United States Patent Application Publication US 2025/0195589 A1 - sequence listing, part 6

SEQ ID NO: 12 - DNA, 2459100 bp, Lactobacillus crispatus
  source 1..2459100: mol_type = genomic DNA
ttgttcgacattaataaattttgggaacactttaatgacgagatgcgtgctcgtttcaacgaagttgcctacaatgcatggttcaaaaatactaaacctatttcatataatggaaaaacacatgaattaaaaattttagttcaaaatcctgtttctaaaggttactgggaaaagaatctatcttctcaattgattcaatctgcctacggttatgccgacatcgagatcttacctgtatttaaaatatctgaagatgcggatattacagaaaggatcgtaacacctgcgccaaagcgtgaagcgcaagttcaacagcctaatttgccagaaaaagaattcactaaagacttgaagttaaacgaaaaatacacttttgataacttcgttcaaggtgagggaaacaagttggccgccggtgctgcacttgctgtagccgacagtcctggtagtttttacaatcctttatttatttttggtggcgttggtttaggtaaaacacacctgatgcaagctgttgggcatcaaatgctagcagagcgacctaacgcaaaagttgtctatatacagagtgaaacttttgttaatgacttcattaattccatcaaaaataaaacgcaggacaaattccgcgaaaaatacagaacttgtgacctgcttttagttgatgatattcaattttttgcaaaaaaagaggggattcaagaggaattcttccatacttttgagacactttataacgatcaaaaacagatcgtaatgactagcgatcggttgcctacagaaatcccagatctatcagagcgtttagtttctcgatttacatggggcttgcaagtcgaaattacgcctcccgatttggaaaccagaatcgctattttgcgacgcaaagctgaaacagaaggttggactatcgatgatggtacgcttaactatattgcatctcaagttgatactaatattagagaacttgaaggggctttagttaaagttcaagcttatgccacaattgaaaaagcagatattgacgttaaccttgcgcgtgaagcattagttgacctcaaattagttcaaaaaaatcgtggattacaaatctctaaaatacaggaggttgtcgcaaactatttccaaacttcaactgctgaattaaagggtaaaaagcgtgtacggcagattgtagttcctcggcaaatagcaatgtatctttctcgtgaattaacagatgccagtttgccaaaaattggtcaagaatttggggaaaagatcataccactgtcatgcatgcttatgataaaatcgacaagcagatgaaacttgattctgatatcaaaactgctgtctttgacctaaagcaaattttggagcactaaaagttatccactgtggaaaaataaacaagttttacacaagtttttaaccgtaacaagtccgttattttaggcttcttatgagttttcaacagaactcacaggccctactactactaattaattatataattactaataaagagaaatcacacagctattcttgggaggaaaaacatgaagtttacaattaatcgcaatctgtttatcgaaaacctcaataatgtaatgcgggccatctcatcaagagctactattccaattcttagtggaattaagttagacttaacagaagataaacttacgctaaccggtagtgatacagatatttcaattgaaattcaaattccagtcaatgatgatttaaatgtggaatctacaggttctattgttttaccagctagattctttagtgaaatcgtaaaaaaattgcctggtaaagacttctcatttgaagtaaaagaaagttttcaaactcagatcatatctgaaaatagtgaatttacaattaatggtttagatgctaataactatccacgtttaccagaaatttcagatgctgcttcattcactatttctggtaaaactttccgtgaaatcattaatgaaacgcaatttgctacttccaatgatcaaacacgagcaattttaactggggtacgtttcttctttagtccagataaaattaaagctgtcgcaactgattcccaccgtttatctcaaagaacaattgctttagaaaacggacctcaagctgaaactgatttgattattcctggtaaaagtttgcaggaattagctagaatcattggtgaagctgatccagaagttaaagtttgcccaggtgataaccaagctttatttgtaattggcaacttgtccttctattcacgtcttttggacggaaattatccagacactgatcgcttgattccgactgaaaagaccactagtgttgaatttgacatttccgaattatctagtgcccttgaacgtgccagtttgttaactcatgctggccgtaacaacgtggttactttgactttagatgtagaaaatcaatcagctaagttatcaggtaaatctgcggaaattggtaatgttgaagaagatgttagcttcagaaatcttgaaggaaacaatttagagatttccttcaaccctgactatatgcgtgatgcgttaagagcttcagtaacagattctgtaattatgagttttactaagccacttcgtccatttatcattaatccagataaagaagacattgaatttgtgcaattaattacgccagttagaacatattaatcaagtacacaatatttaggtcataaaaagtcgtcaaataaggcgactttttattttgcttttaaacgaaaacgcaaaatattggcgtatatttatttttttaccgtgctagtgtgattaggttattttgaaaaaaagctctgaaaaggcttataagagcgatttagtttgttatttgtgttgaaaactaatataattatataggtataaagcgtattgaaggtgagcattattaagtattttaaagttgacggcgatcatattactttggggcaattcctgaaggaagagagcattatttcatcaggtggacaagctaaatggtacttaaaagataatccagtaactttaaatggtgaacttgaagatcgaagaggcaaaaagatgcatgttggtgatcatatagtggttaatggccaagaatatgagtttcggtagggaagtcaatgtatcttgatcattttactgtacagaattttcgtaatttaaaaaagcttgacgtaaattttgattcaaacgtcaatatttttattggcaaaaatgctcagggcaagaccaatttgctagaggcaatctattttttagcattaacacgttcacataggaccaataatgataaagatttaattggtttcggcggtgagtttaccaatttacttgggcatgtacataaaagccaggtggatcttgatttacgtgttttgatcacccaaaaaggtaaaaaagtatggattaatcgagttgagcaggcgaagttgtctaaatacgtaggtcagctgaatgcgattttattttcaccggaagacctcgagttgatcaagggtgcaccagcactgcggcggagatttatggatcaagaatttggtcaaataaatgcagagtatttatacttcgcaagtaagtatcggcaagttttaattcaaaagaataattatctgaagcagctagctaaaggtaaggcaaaggatcaggtctttttagatgtactttcagatcaactagctggtatcgccgctgaagttgtctttcgacgatttaaatttcttaagtatcttagtcactatgctagcgatgcttatgcacatattagtttaggcagtgagcagctttcaattgcttatcatccatcagtggctgacatccaagctgatgacagtacagaagaaatttatcaaaagattttagcaagttatgcacgaaataaggcaagtgaaattcgcaaggggacaactacttctgggccgcaccgtgatgatattgaatttaaacttgatggtcaaaatgcacatctttatgcttcgcaagggcagcagcgttcaattgcacttagcgtcaagctggcggaaattcaattggtgcatcaactaacagatgagtatcctttactcttgctggatgatgtaatgagcgagttagatcatggtcgacaaagtgcgctacttaattatattcatgggaaaacgcaaacctttattactacgactgacttagaggggatttcctgggaaataattaaaaagccgcgtgtgtatcacattcaatcaggcaaaattagtttggagaaggagaattaaatggctgataattcaaaagaaaatcttgaaaaggtcaaaaaatatgaaaaagaggctgacaagtataatgccagtcaaattcaggttcttggcggtctagaagctgtacgtaagcggccaggtatgtatatcggttcgactagttctcagggattgcaccacttagtgtgggaaattattgataacagtattgatgaacgacttgctggttttgcgaccaagattgaagttacgactaacgaagatggtagtgtcaccgttcaagatgatggacgtgggattcctgtagatattcaagaaaaaacaggtcgtcctgcattagagactgtatttactgtacttcacgccggtggtaaattcggcggtggtggatataaggtttctggtggtttgcacggagttggggcttcagtagttaacgctctgtccactaaacttgatgttaccgtaatgcgtgatggcaaaaagtactttatcgatttcgatcatggccgtgttaaggatgagatgaaacaaattggcacggttccacttgatgaacatgggacgattgttcacttctatccagatccagatattttcacagaaactattgtttttgatgacaagatcttgaagaacagaatccgtgaattggcctttttgaacaagggattaactttaacctttactgacaagcgtaaagacactgccgaaacagatgtgtataagtttgaaggtgggattaaggaatacgttgcctttttgaacaagggacaagaagtattatttgatgatccaatttatgttgaaagcacctataatggcattgatgttgaagtggctttgcaatatacaaatggctataagactactttgatgacttttgccaataatattcacacctatgaaggtgggatgcacgaggccggttttaagactgcgttaacacgtgtggttaatgactatgcacataagtctaagatcttgaaagataaggacgataatctttccggtgaagacattcgtgaaggaatgacagctattgtctcagttaagcaccctagtccgcaatttgaaggtcagactaagaccaagttaggtaattcggatgctagaactgctgtagataaggctttttcagaaacctttagtcgtttcttgatggaaaatccttcagttgggcgcaagatcgtagaaaagggtcaattagccgaacgagctagaactgctgccaagcgtgcacgtgaagtaacaagaaagaaatctggtctggaaattgctaatttaccaggtaagttagccgacaatacaagtaacgatccaagtatttcagaactgtttatcgtcgagggtaactcagccggcggttctgctaagcaaggtagatcacgtttaacacaggctattttgccaatcagaggtaagattttaaatgttgaaaaagcttcgatggatcgaatcttggctaaccaagaaattagatctttattcacagctttaggaacaggctttggtgctgactttgacgtttcaaaagcacgttatcacaaattgattatcatgactgatgccgatgtcgatggtgcccacattagaaccttgctgttgaccttgttctataactatatgcgcccaatgatcgacaagggctatgtttatatcgccaagccacctctataccaagttcgtcaggggaaagtggtcagatatcttgatactgacgaagaattgcatgattacttaggtagcttgcaaccaagtcccaagcctactgtgcaacgttacaaggggttaggtgaaatggacccagagcagttgtgggaaactactatgaatccagaaaatagaagactggatcgggtaagtcctgagtatgctaaagatgctgacgcagtctttgagctcttaatgggaaatgaagtttcaccaagacgtgactttattcaaaagaatgctaaatatgttgaaaacttggatgcataggaggattagatggacgagaatcaaactcaagatcatagaattaaaaacgtcgatctaactagcatgatgcgtagttcatttttggattacgcaatgtcagttattgttgcacgtgctttacctgatgttcgtgatggcttaaagcccgtacaacgtcgtattctttacggtatgagcgagttgggggtaacgcctgataaaccatacaagaagagtgccagaattgttggggaagttatgggtaagtttcacccccatggtgattcctcaatctatcttgctatggcacacatggcacaagatttctcataccgttacatgttagtcgatggtcacggtaacttcggttctgtcgatggtgatgagccagccgcaatgcgttataccgaagcaagaatgagtaaaattgctgtggaaatgttgcgcgatatcaacaaaaacaccattgattggcaaagaaactatgatgataccgaaaatgaaccggttgtcttacctgctagaattcctaacttgcttgttaacggtgctaacgggattgccgttgggatgacaacaaatatcccgccacataacttgactgaagttattagtggtttgcacatgttaatgaaaaatcctgatgctacaaccaaggacttgatgaaagttatcccaggtcccgattttccaactggcggaattattatgggacgtggtggtatctaccgtgcttatgagagtggtaagggtaacattgttgttcgcgccaaaaccaatattgagactgaaaagagcggccgcgagcgcataattgtgagcgaaattccatttatggtaaacaaggctgaattggtgaagaaaattgctgatttggctcgagaaaagactatcgatggaattactggtgtgcgtgatgaatcagaccagacagggatgcggattaccattgatattcgccgtgatgctagtgctagcgttgttttgaataatttattcaagcaaactcaaatgcaggctaactttggtatgaatatggtggctattgttgatggtgcgccacactttttaaccttgaagcaaatgctgcaatattacttggatcaccaagaagatgttgtaactcgcagaacaagattcgagttagctaaggcagaggcaagagcccacatccttgaagggttaagaatcgctctggacaatattgatgaaattgtccacattatccgcaatagtcaatcaagtgacattgctaaagcaactttgattagccgctttggccttgatgataagcaatctcaggctatcttagacatgcgtttggttcgcttgactggcttggagcgcgataaggtagaagctgaatacaaggaattacaagctaaaattgctgactacaaagatattttgtctaagcctgagagaattgaccaaattatctatgacgaattgcttgatattcaaaaacgattcggtgataagcgaagaaccgaaattggtgctagcgaagtcgtttcaattgaagatgaagatttgattgaaaagcaaaatattctgttgacggttacccataacggctatattaagagaatgccaattcaggaatttaagactcaaaaccgtggtggtaaaggtatcaagggaatgggtgtacaagatggcgactttattgagcatttgatttactcaagtacgcacgatctgctcttgttctttactaatgctggtaaggtttactccaagaaagcctatgagattcctgaatacggccgcgcagctaaaggattgccagtagtcaacttattgcaattggaaaagggcgaaaaggtccaaactgtaattaatattccggaaggtgctgacgataattacttattctttgttactaagatgggaactgtaaagcgtacacacgttagcgaattttctaatattagaaacagtggtttaattgccttaactttgaaagatggcgatgaattaagcaatgttttgactactgatggtaagcaaaacatcttaatcgggactcacttgggctacgctgttaccttcaatgaaggcgatgttcgggcaatgggtcgaactgctgctggtgttcgcggaattaacttgcgtgagcatgactatgttgttggttcaggtattttaggtgctgatgaccaagtcttggtaatttctgaaaagggttatggtaaacggactccagcttcagaatatccagttaaaggccgtggcggtaaaggtattaagactgccaatattactgagaagaatggtccattagctggtgtaacaatcattaactcaaataatgatgtgatggtaattactactgacggaattatgattcggtttagaattgatgatgtttcgcaaactggccgtagcaccatgggtgttcgcttgattaaagttagcgatgatagtcaggttgcaagtttaaccgttgttccaactgaggaagaacaagatcaaactggtgacgatgacgactcaaaaaatggataattaattaaaaaaacaaaaaatttgaacttttaaaaaaattatcaaacttttttgcgtaataaataatgagcagtaaaaaatctgctaggatcacgtgaaaacagtttggtaattttttatttatatgctaaaattagaaattgcgagtaatattccattactccttgttcttgattttagcaagaaccatatagtccagaaggaggtgcaatagtcatggcaactacaaagtacgaagtaacttacatcatcaagccagatgttgacgaagacaacaagaaggcagttgtagaaaactacgacaaggttatcgctgataacggtggtactatggtagaatccaaagactggggcaagcgtcgtttcgcatatgaaattgataagtatcgtgaaggtacttaccacattatgactttcactgctgacaacgctgacgcagttaacgaatttagccgtttgtcaaagattgacaacgctatcttacgttcaatgaccgttaagttagataagtaattttaatttattatccgttatgtgatttaggaaaggaaggtacatgagtatgattaatagagttgtacttgttggccgtttaacacgtgatcctgaattacgtactactgggagtggaatctcggttgctacgtttactcttgctgttgaccgtcaatttacaaatagccaaggtgagagaggcgcagatttcgtcagctgtgtaatttggagaaagtcagcagaaaacttctgcaactttacttcaaagggttcattagttggaattgatggccgaattcaaaccagaagttatgataataaagatgggcaaagggtatatgtaaccgaagttgttgttgataacttcgcattgctcgaatcacgcaaggatcgtgaagcccgcggtcaaaatggtggttatacaccaaatagtggaaatgctggcagtcaacctgctaacaatttcccaaataatggcggatcacaaggtaattcacagactaataacaatcaaaataattcacaagatccatttagtggctcaggtgatacgattgatatttctgatgacgatctaccattttaaactaaattaaagaaaggattctagaacatggctcaacaaagaagaggcggccgtcgtcgtcgtaaggttgactacatcgcagctaaccacatcgactacgttgactacaaggatgtcgatctgttgaaacgttttatctcagaaagaggtaagattttaccacgtcgtgttactggcactagtgctaagaaccaacgtaaagtagctaatgcaattaagagagctcgtatcatgggcttgttaccattcgttgctgaagactaatttagatcgaaataaaccaaaaggacaggacacaaggttctgtccttttttcgtataataattaaaaaaattctctcttcgtattgtaccctaagtgtataattttttacggtaagttgaataaataattaaaaaagcccaagtcctttgaatttggacttgagctcaaacaaaaagaccagtagtctgatgttaagaacaaaaaacacattagaagctggtcttttatgaattcaattgtaactgaaatcgcaaatattataaagtctgaagataattatattaagcgtgaaagaaaaataatctgtttcttcttaaacctgattaaggaaatcatggccttggctttagctaaagttgatgatgaaatgattaccaaggttaaagcacagggatatcagattgataagaagaatgagcgctcaatcaatatggcttttggcgaagttaggtatgtcagaagaagatatgtctgcccaggcaaacaagcaaggtatcccttggatgaattaataggctttgacaaatacaagcgctacagtattttagcagtcaaaaacatcttagaagtaagcagcgttgccacttatcgcaatactgctctagcagtcaattgcctgtctggctttaatattagccatatgcaggtgggcaatttggtaaaaatggccgggaaaaatattaaagcgggccaagaagcagattcaagatatgatgccgcaggcactaagaaaaaggtcccagttttgtatcttgaaggcgatggcgtggtgatcaaaggcactaaaagccggttggaatttcatcgctatcaggtctgtgaaggcattgtcaatataagcaagaaacgcagaaagcgaatcaatgccaaggaatttgtttctttaagccgacttgatgcgctgaacgaagccaaggagtacctggccaatacttatgatctttctgatactgtaattcttagcaacgccgatggcggtgctggatatgtcaaaacagacttcgatgacattgtagggctatgcaagcgtcatgagcatttcttggatgtctttcacctaaataagaaaatcaaagaaaggctatattttgcgcctgacctgcaaggcaagctgatttctgctttggaatacaaatacagctatgacaaaactatcctaaccactgcagaaagccgactaattgatgaattgaataccgagctcaatcatgattatctggggcgcctaaagaattatattgatcgtcattgggacgatattaagccgtttaagaaacgaaaactgactgtgactaaagccattggctgctgcgagagcaaccaccgcaagtatacctaccgtgttaaggggcaaggcaagaaatggtcaaaatctggagcagaaggcatgcttaggatcttaagctgcatcaagaatcgagagctggaattttggcttagcagcgagtttgaagattcagaaataactgtattgactgaacaggaattaaaagcagcggcccgtgacagcttaaagaagcgtcatgaagttcatttaggcatccagcatggcgcattaaccgcacaggtagctggcaatagttatttaagcaagctaagcagaaatttaagtcatataaatatttaagaaattaaggttagactaatggtttaaaggctaccgcaaaaacattgacacttactattgtacctactgttttcaatcatgagccggaataaggtataattaacactgatatactatatctattaggaaggatcttcatgaaggattttttacgtaagctagaattgcctgaatttattaaggattcacggctgacagcttctataatcattgcactttctctttcattattgggaagcattattgcgatgattatgaatccattgtttggtttggcaatgcttttagtctttattttgaccgttgcctttgccatctatgggacctatattttagcgggtaatgcaaatagctttgcggttaatttgtcttaccggataaagcgtagtgaacaagaagcaatgattaagatgccgttgggaattttgctttatgattcggatcaccaaattcagtgggttaatccatatctgcaattatatttaaagagtacagatttagtggggcacacaattgaatcagttgaccctgatctgaataagctacttaatgaagcaattgaggcaaaaacagcagaaaatcatctggttgattgggatggtcaccgatttgaaatggtggtccaaaataatttaggcgtaatatatttattggatattacgcgctatgccaaaattgaagataaatataaagctgaacgattggcgattggtcaaattttcatcgataattatgatgagctaagtgaagcaatgcatgatcaagaattgaccagcatgagttcatatgtgcaaaatacattgagtgattatgcgaaaaagtttaacgcatatttaaaacggattgatgaagaccatttcttgatcttgatccatatgcaagaattagctgagatggagaaggacaaattctctgttttagataaggtgcgtcaagaaacgagtagaaacaatacgccacttactttatctatgggaattgcttttgggagtgattctttgtctgaaattgccaaccaggctcaatctaacttggattttgccctaggtcgaggtggagaccaggttgtcttacgtcaacccggtaaagacgcccgcttttatggcggtaagtctaatccgatggaaaagcggactagagttagagcaagaatggtttcacaagcaattagtgaactatttaaagatgccgatcaagtttttgttgttggtcatcagcgtcctgacatggattcagtcggtagtgggattggcgtagtaaaattagctcgtcttcacggagttaaagctaattttgttttagatactaataagacaaactatgatgttggtcgcttggtcaccttaatgcaacagaaaaatcaggataaggatatttttattaaccctgatgtagctttagctcaagttactgacaagtcaatgttggtaatggttgatcattcgaagtattcaattacttactcacgggcactttatgatcgtttgaagaatcgaatcatcgttattgatcaccatagacgaggcgaggaattccctgaaaatccaatgttaacctatgttgaaccatatgcttcttcggcttgtgaattggtcactgaaatgattgaatatcagcagccagctaacggtaagcgagttttgaccgatattgaagctacagcaatgttagctgggattgtggtcgactccaaggaattctcgttgagaacaggaactagaaccttcgatgcggctagctacttacgttcaatcggggctgactcagcagttgtaagcatgctcttgaaagaggatattgatagtttcctcgaacggacgcatttagtagccactttgaagatggtgaagccacatatggccgtattatgtggacctgatgataagattatagatccgatcattacagcgcaggcggctgatactgcacttgatttgggaaatgtgggtgctagtttcgcaattacgcggcgcagtgataatacgattggtatttcagctagatcaatgggtaagatcaacgttcaaattattatggaaaaattgggcggtggtggacatctttctaatgcggcaacacagattaaagatgttactattgaagaagcaaaacaaaaattacttgatgcaattgatgaatatgaaaaagaaaatgattagggaggacaaatatgaaagttatttttactcaagatgttagaggtcgaggtaagcgtggacaagttaaggacgtacctgatggctacgcacaaaattacttgattaagcgaggcttggctaaagaagctactaaaggtaacatgaataccttgaagcgtgtagaagctaatgaaaaggctgcttatgaagcagaaaaggccgaagcagaaaagatcaaggcagaacttgaaaaagacgataccgttgttaacttcaaatctaaggctggtactgactcacgtttgtttggttcaatctcaagtaagaagattgtggaaggccttgaaaagcaatacggtatcaaggttgataaacgcaagcttaacttgccagaaccaattaagactttgggctatactaatgttcatgccaaattatttaagggtgttgaagctactattcgcgttcacgttactgaacaagactaataaaaagtggttgtgattgatggataatatcgtttctcaacaaattccgcatgatcgcgatgccgaaagggcagttctgggtgcgatttttatcgatcctgaagcaattgcggatgctagtgcggtagttcagcctgaagatttctatgagcgggctaatcaaattgtctttcaagcgatgttggacttgtctgatcgcggggatgcaattgatacgctgaccttacaggatgaattaaataaaagaaatcagttagaagatattggtggtatcggttatgtttctgaattagcgatggccacaccgacagcagcgcatgttacctattatgccaaaattgtgcataggaaggcgctgcttcgtcgtttaatctctgctagtcagaagattatctctaatgcaatcgatggctctgacgatgtaacagacattctagatgacgctgaaagtgaaattatgaatgtttcgtcagagaatagcacaggcggctttaggaccattaaagagatcgttaattcagcgattaatgatattaataatattccggatgacggaaatatggttactggcttgccgactggttttgcggaattagataagatgacaactggttttcacgatgatgaattgatcattgtagctgctcgtcctggtgtgggtaagacttcatttgccttaaatattgcgcaaaatgtagggctacacactgaaaaaagtgtagctatgttctcactagaaatgagtggagagcaactggttcagaggatgttagcttctgaaggactgattaattcacagcacttgagaactggccagcttgatgaagaagaatggcgtaaattggtagtggcttctgggtcactagcaggtgcgcaaatctttatcgatgatacgcccggaatcaagatgagtgaaattcgtgctaaatcacggcgattagctaaggaaaagggcaatcttggtcttattgtaattgactacttgcagttgattgagggaccacgtagtgagtcacggcaacaagaagtttcagctatttcacgacaattaaaaaagctagctaaggagcttcatgtgcccgtcattgccctttcgcagctatcacggtcagttgagcagagacaggataaacggcctgtactgtccgatattcgtgaatctggatcaattgaacaagatgccgacattgtttctttcttatatcgggatgattattatcgcgatgagcctaaagatggcgaaagtagtggcagtcaagatgaagttggcgcagaagacgataacggtgaagtagaagtcattattgaaaagaaccgttctggtagtcgggggacagttaaattaatgttctctaagccgtttaaccggttttcaaatttggattatgcacatgatcctaatggcaattaagattaatcaagtgtctgggaaaaaactaagtctcagatcatgaaaaaagaacgttgaatttttgtttcaacgctctttttgtatacttttagctccagccttgatattattaaatcatcacaaaataaaaacaaaaaggtggaaactaacatgtacaagaattatatcacaggtcaaactgctttaacacttaatctagattttgccattccggccaatcatttggctaatgtcatcagctggtttgtagattcaattccagaagatgttttagtaggcaagactgctaaaacgggccgcccagcctatcatccagccatgatgctcaaaatactgctttttgcttactccagaagagttttttctggcagaaagattgagttgatgctggaagaaaatctgccaatgatgatcttggctgaccagcaaaagatttcatatcatactatcaataattttagatcaagcagccatgccaatgaactgattaaaaagagctttatctacttcactaacctgttagaagatgaaggcttaatcaatgaaggtgctgcttttatcgatggtactaagattgaagctgatgctaaccgctatacatttgtctggcgcaaagcggttgaaaagtatcatgaaaagctgaaaggccaggcagttgaactttatgatgaattgattactaaagaagtagtcaaagaaatggaaaaagaaaaagttcaaactagtcaggggctaaaggaattagctcaagaaactgaagcagaaattaacaagctgactaaagagattgagcaggaaaacaaagccattcctggcggttcacctcgaaaagccaagcgacgtggactaaaaaagattctgcaccggctaagaaaagattatgtgccaagaatgcaaaaatatgaagaagccgaagagatctttgccggacgcaacagttattccaaaacagatcatgacgccacctttatgcatatgaaggaagaccacatgaaaaatggtcaattaaagcctggctacaatattcaagcagtcacgaccgatcaatatgtagttgattatgccatctttcctaatccgacagatttcaaaactttggagccggttttggatcaaatgaccgtgttggacaagtttgacaaaatcgtcgccgatgctggctatggcagtgaatacaattattcgatgctggaggaaaaatatccagacaagaagtactttattccctacactatgtatgaaaaagaacagaccaaaaagtataagaatgatccaactaagctaatcaactggtactacaatgaaaaagatgattattacattgatcatcatggcgtcagattcaatttcaaatattacagccagcgtaaggatcgttctactggtcaggtccgtgattttaaggtttatgaggcagacgagttccagctaacgccagaattggaacaattggctaaaacagctagcggccgccagcgccaagttcgctataatcctaactggcaatatttaaaagaaaaagcaaaagaagttctccaaagcgaagaaggcagacacatctatggcatgagaaaatatgatgtagagccagttttcggacatttgaagaacgtatttggcatgcgcagaacgcacctgcgaggtaaagagaaggtcgaaaccgatatcggaattgcctttatgatgatgaatttgaacaaatattgtcaaagaaggtggctgaagggccgatttttattgttaaaaattttaaagagaacaaaaaaacgatcaagattcttaaaaaaggaaatcttgatcgtttttattcatctggaagctagttttttcccagacacttttttgtacttaaataaaacacaaacaatatttgcatagtattgtactataatttatattttatattgaaagtacacttaatatttgttataactaatattgaaaagatcaaattacgaatatactactcatggaggaatagcgagtttatgaagtttaagaaaattttgcttggtgcgtgtgcagttttagcagtcgtttcactagctgcctgctcaaatagtaagaagagttcatcctcatcgaatgaacctaaggaattgaacgttgaatttgtaccaagtacccaagcaaataagatggaagctaaggccaagcctttaggcacattattgcaaaagcaattacacattccagttcacgtaaccgtttctaccgactatagtgggctggttgaagcaatgtcatctaagaaagttgacgtaggctttatgccaccatattcttacatattagctcataaaaagggaattgctgatgttttattgcaagccgaacgttacggctatgatgaaccatccggtaagatgaatcataccttaatgcataagtatcgtggtatgatcgtggttaagaagggctcaaagatcaaatcttggaaagacttaaagggtaaaaagattgcgattggcgatcctagttcttcatcgggctatgtttatccagttgcggaactttacaaaaagggtttgaatgtaaccaaggactgcaaattagttaatgttaagggtgacgatcaagaagtgttatccgttttgaatggggatgttgatgccgcattcgtcttctcagatgcacgtaatattgccgctaaggatgacaagaaagcaatgaccgatgttgtgccaatctactttaccaagtggattccaaacgatactattgcggttagaaaagatatgcctaaaaaattcagagttaaattagctaaggctttcaagaatattgctaagtctaagaagggtaagcaaattatcgaaagcatttataaccattatggttacgttgaagctaaggattccgactttgatggcttacgtcaataccaaaagattgtgaacaaggctaccggtggtaataattaagattaaaaaagcactcactaagtgctttttttgtattcatgctaagatcagttaaaataaataaaacactaaaagcaaaaatgaaaagagaagaaaaaatatgaaaattgctgttttaactgatagctcagcttatttaactaaagaacaacaagaaaaatatcaaatcgatgttttgccaattccaattatttggggcaaaaaagtatatcatgacttagtcgatattggttatgaagaattttatcaaaaactaaatacagcaaaagagctgccaactacttcgcagccttcaatcggtgatcttaagcagaagattgatgaatacgtggcagcaggctacacggatgttattgtaattactctttcaagtgggatttctagctatttctcaaccgttcagagtgttgcggcagaagaagaccgaatcaaggttcatccattcgatagtaaaattacctgtgctggtgaggcggattatgctatgttggcaggccgtttaatcgaggctggagcggatattgatttgatcatgcatgatcttaaggacctgcaaaaaacgatggatgtgcgctttatggtggacgatttgagccatttgaagcgtacaggtcgtttgtctaatgcggcaagttttgttgggacgctgtttaagattaagccgattttatcgatggatgtgcaaaatgaaggccatatttcagcgattgcgaaagagcgtcaatataaacgtgcatacaagcatgtgcaaaatgattttgataatttgactaaaaatatgccgtataagattcaggacacaatttttgattcacttgatcctgagaaaaaacaggcctggcttgatgattaccgagctaagttccctaagtataagtttgatactagtattatcggccctgttgttggggtgcatgtaggtcaaggtacaatgtcgatgatctggtgccgtgatttggatacttattttgatgaaaatggtcagccaatcaagggaattgagtcacaagcagtagtggatccagagtaagcataataccgatatggcaaaaaaatgagaggcactattgattctttaatatcattgctatattattattaataatttaatatggcgatgaatagggatgatcagagtgtcaatcagttctttttttaaaaagttaatagccaaaaataaactcttgtttttagctatggtgattactagtgcttttgcttctttagatggcgtcatttctccttatgttattgggaaaattactaatacactttctcagaaacattttagtgagataccgaaaatcttgttactgtatctgttgatgatgctttttctgaatgttagcttttatctatggcaattttgttggggaaaaattaccaaatcaagtaatgaattattgagatctacagcttttaataattttattgcttcccctagtgaaaagaaaatcactaataccctgaattttatcaatgttaatgttaaacaaattgaaaatcaatgtattgattcaacaattatgcttgtttactgcgttgagcaagccatcgtttcattagtttatattttaagtattaatggcattgcagcaatggttttcttagtttgtgggttaattccatcagttattccacgtttaactcgtaattgggttcagacaggaactaaaaagtggaatagcagttatgaaaactataatcaaaaaacaagtgatgctgtgtatggttttgatactatcagacatgcaaatggtgataatagattcaaaatatttgtccaaaaagcattaatgggagaagaaaagaagtattttttgatgaattttcggcgtaatacttctaattttttagcccaggtctcttattcattatcaatggttatttctttggctgttggtacattctttgtaattaatggtcaaattctagtaggtggtttgatttctctatttttagcatcagatcgtttaactagtccaattatttcgattgttaatattgcaaatcaattgacctctgttagtcctctgctaaaaaataaagctttacaaaaatctaaaaagcaagaatttaataatttagacttcaccaaattaccaaaccaagagaaaataatttttgatcactgcaatttagggtattctaataaagctattttgaagaatattaatttgacagtttctaaaggcaataaagtattgatcatcggtcgttctggtattggtaaatccactctgttcaagacattgcttaatgaaattccattgctaaagggcaaaatactggtagataatagtcttaaccaagctaatttctataccaattttggtattgttagtcaggatacttatatattcgctgaatctttgcgctttaatttaacgcttggaaaagattttcctactcagcaagtaataaatgttttgaaaactgttaaattaagttatttagctaatgaaaaaagcttagacatgcagatcggggagaagggattatcactttcgggtggagaaaaacgaaaactggaaattgcacgagctttattgaatcaaaaatcgattttacttgttgacgaaggactatctggacttgatgaagaaagcaataaacaaatttttgcacttcttcaaagtcttccgcagacagtaattgaaattgaacatgctgttagtccagaagagaaaaatcaatttgatcaaattattgatctaggagctcagtattgatttttttataaataaacaaaaacaattacatacgtatgaaagcctttacacataaagacttttttatttataatattagcagcacgaaaactttttggagaaaaacttacatacagaaaaggatgagaatatggcagaaaagaaatatgtcggcagtatcgaagcaggcggtactaaatttatcgtagctgtgcaagatgttgaaacaggtaaggaagtagcgcgtgatcgtattcctaccactactaacaaggagactttacaaaagactgctgaatttttcaaaaagcaccccgttgatgcattaggaattggtacttttggtccaattgatatcaatcctaactctcggacttatggttacattttggacacgcctaagccaggttggtcaggtacagatgtgaagggcttctttgaaagaaaattaggtattccagttgccatgacgactgacgttaacgcatcatgttatggtgaatatgttgctcgcggtcgcgatgattctaagagctacttctatgcaacagttggtactggcgttggagctggaattgtgcaagcgggtaagttgctcggtttgaataaccacccagaaatggggcacatgttggttcgtcgttatcctggtgatgattatgaaggccattgcccattccataatgatgcttgtgttgaaggcatgtctgctggtccaagtcttgagggcagaactggtatccctggtgaaaaattgtctcgcgataacaaggtcttcacttattctgcgtattacattgctcaaatgctcttcaatgtttacatggctgctcgtccagatgtaatgattgttggcggttcagttttaaatgaagatgatttggttaaggtaagaaagttctttgatgaatttaacaacaattacgttgccacacccgatttgaatgaattaattgtgcgtcctgctgtggctcacaacgggtctgcaactcttggcgattttgaattagctaagaatttgctcaaataaaaaagcatagataaattgaataagcaataaaaaggctcaactcgttaagaaagacgtaaggcgagccttttttgacgtaatttgacctaaatgcgcgtaatattaattctagaaacgtaaccggtttattaagaaaggagcccaactatgaacaaatcagatagtggcttaaaagacaaagttatcggtaaagtgaaagaagtcgaaggtaaaattaccggcgataaatcacgcgaagtccaaggaaaagctcaacaagccaagggcaaagttaaggacaaagccaaaaaattaaaggatgatctggaaaaagaccatcaaatagatgaagattgttaaagactcaggtcgactagcaatagctaaacagaaagcaaataggtgatcctatgttatcatggatctgggttttaatcgttggcgctataataggtctaatagctggtttcataaccggcaagggtggatcaatgggatttctagctaatttaatagcagggctggttggttcaaccttaggccaagcaatctttggttcgtgggggccgcaaatggctgggatggcaatcgtaccatcaatattgggagccgtcatcttggtactagtggtttcctttgtactagggatgcttagaaaaactgaataaaaatagaataagagaagtgtctgggaaaaaactaacccttagatactgaaagacgatcaatccaactcttaatttgagttgcttgaccgtctttttctgtctatttttatttttgaacaaagaaaattggtcttttgaccatcttctgttccaatatttgcttaaattcatcatcatgaaggctattcctatatctgtttcaaccttctttttgcctcttaaatgagttcggcgcatgccaaagacgttcttcaaatgtccaaaaatcggctccacatcatatttcctcatgctgtagatgtgtctgccttcaggactttggagaactgctttggctttttcttttaggtattgccagttaggattatagcgaacctgacgttggcgtccgctcttagtcttggctaagcgttctaattctggcgttagttgaaattcatctgcttcatagaccttaaaatcacgaacctgaccagtcgatcgatctttacgttgactataatatttgaagttgaatctgacgccattttgatcaaggtaataatcatctttttcatcatagaaccagttagccagcttagtcggatcgttgcgatgctttctggtcttttccttttcgtacatggtataaggaatatagtacttcttgtctgaatactcttcttctaacattgaataattatattcgctgccataaccagcatcagcgacaatcttgtcaaacttgtctagtgtcgtcatctgctttaaaaatggttcgaaagttctgaaatcagttggattagggtataaagcaaagtcaaccacatattgatcagtggtggcagcttgaatattgtagcctggcttgagctggccgttcttcatgtgatcttccttcatatgcatgaaagtcgcgtcatgatctgtcttagaatagctgttacgccctgcaaagatttctttcgcctcttcatatttcttcattcgaggaacatagtcttttcttagtttatgaagcagctttttaagaccgcgtcttcttgcttttctaggcgaaccgccagggattgctttgggttcttgctcaatttcttcggtcagcttttcaatctcggcttccgtttcttgtgctagctctgccaaaccttgactggtctggactttctcttttgccattgctttgacgacttctttggcaatcaattcatcataaagctcaaccgcttgacctttgagcttgtcatgaaatttttcaactgccttgcgccaaacaaaagtatagcgattggcgtcagcttcgattttagtgccatcaataaagatcgctccttcattgataaggccctcggcttctaacaaattggtaaagtagaggaagcttttcttaaccagctcattggcatgcttgctggatctaaagttattgatagtatggtaagaaatctgttggtgttcagccaaagccatcatcggcacgttttcttccagcattaattcgatttttctgcctgaaaatactcttctggaataagcaaaaagcaagattttaagcatcatcgctggatgataagctggacgaccggttttagcagtattacccaataagacatcttctggaattgaatcgacaaaccagctaatggtattagccaaatgattatgaggaatagcgaagtctaagttgagtgttaaagctgtttgacctatggtataattttgatacattaagattgccttctttctttttgttttgtggtgattcaataatatcaaggaaggcacttaaagtatagaaaaagaacgatgaaatccattaggaaatcatcgttcttttttcctgtctgagaattagttttttcccagacactttgtgtttcatgtgaaactattttagcttttttcgttcattttctttctcagctaaaaaacgttgcttaatttcttcaggcaaaagactagggaccgtcttgtcataaaattcaaagaatatgggtgccttgttagagtcattgctcttgggatataaggcaaagtcactttcgctaaacggtaagctgatattaccacgtaaagcattgataatctcaccgaacatatgcaaaacataacggcgcgtctcaggctctaatgacatgattacgcgactgaaacggacagtgcctaataatttatgggcagtaatttgaaaaatatcggtaatatttaattcatcaaatgcttggaaaagagcatcccataattcaccacgttgcttttcagggatgctgtagttaaagtcgatgaagaaatgccgcaaagaacgtgcacctgaagtaagtccttctgctagaacaaaactatcacggccaacagaccaacggcgtggatcatgttgctggaccatcggtgcagtgcttttgacgattaaaacgtgttcaggatgatcaagcatggtgccaatgattgaagcttctgggaggtaggtcttcatcttgggtaatgcacgtacaaagccaggtgctttccagacttggtggaaaaagccggggccgtcaaagctaaaggccttgataatacggtcctgcaaatcaggctcagcgacacttaaagcatattcagcgtaattgccacctttagagtgacctgctaaatatattttgtcgtgaggaaattccgcagcaatttcttttaaataatgagcagcaacatcttgcccatagactttaggcatgtagttcatgttcatatcttcgttccagccaattaatgaactgtcagtgccacgatagacaataataattttattgtcagttagtcgaaaagtagcagcggtgaattgcaaaggatatgggtctttttctaggcgattagtccagttaagaatcttaactttgcccaagcgaggtgatttgggcaaaagcagaacttgatcaccagctaaatctttcatttgtacctgaaatgaaggtagtactcgcagtttttcagctacttcgcttagggtgtgtcctttggcagatttgtcgacgggcagataaataatggaggcgaagagagagacatccacactattgaaaggacgctctttaaaagaaagatctccacgccaacgtaaatattcaagtgttccggccataatctcgtcctttctttcacttttagcaataatactattctactagattattgtggcaaaataaaaaatctcaggcgaatgcttgagatctaaacagaattttaaataccaccacgcgtatagctgatgcgcgtaatatctggatacttacgtaagttcatgataattgaattttcgtcaagtttattattgataaccccatcaatgtagaaaactatccgatcatcacttacgtctaaaattttgatagtaatattttcaactttattttctgcaagttcatgtttaattttagacaaaatgtggtgctggttaatagccacaatttgaatgttaaaacgaacatgtggcgttattttgttgataatgacatcatcgtgaaagatcatttgaatgataaacaatagggcggttgataggataccgatgaaatacatgccagcaccaacagccatcccaatggcggcagttgcccaaactccagcggcagtagttaagcctgagacctgttcttttctaactaggattgtacccgcaccaatgaaggaaattcctgtaacgatctgggccgcaattcttgatggatctagtgcaatgtcatgcatgcttaatagatcggtaaatccatatttagatacgatcatgaataaagcagaagcaatcgcaactacgatatgagttctcacacccgcgctttttctctgaatcgcccgctcatagccgattaatgcgccacaaaaagctgcgacaacaattctaagtagccaatctaattcggttgtaattggagctaaagtttgcattatttagtcctcatcctttgtataatcaacaattattatcatttctattttaacgtaaatgcagaaaaattatagtctggggaatttttttgaacttttttcaaaaaagacttgcacagctctcgtctatgtggtttaattaatactgttgtcgggtgagacaacgaagagttgctgacttagctcagttggcagagcacctcactagtaatgaggaggtcggaggttcgaaccctctagtcagcattagttaaacaatttaatagtttttaagtctatcaattaagttcgaaagagcttgatatgataggcttttttgttgtttctagatatttgtgtagatttaaaaatagttatgaatatttagtttcaccacaaaaattgccacacagtttttctagtgtggcatctgtgtggcaaaggttcgattaatgttgtagtggcgggctttattgcttgccatttttttcgttttcaaagtatccatgatttaagaatgactgtcgatactcttttaagatttttatttgatggtctatggcaggaactaacgtatatgcattatttttattgtagaattcatccattaatttagtattcgattccttgtagtccttaatgaaattactatcattttgattcataataatttcttctaactgcatacgaataactaaattaacattattaatcatttcaagatcattggcaccttccaatgattcttcaaattttttatcaaataaaaatttgaatttatctttccaaaaatttattacgtatgatttctttttataatcttcatcatttttagtaaaagaatcagcggtatctttatctccatttatagaaagaaagtgagaaatattatttttcatattactcaattcttcattattatcataatatgctgaaaaaagtaaattaattaacttactctctacttcttcacctctaattccttcgccttttacataagatactggaactttaaatatttctgctaaagctttccatacctcttcatttggaattctgcttcctgcttcgtatcttgctattgttactcgtgtagctgatatgtttttgttctttaaaagattagatagatcttgttgtgtaaaataatttttttctcttagttctttaattcgatttggagtcatattattacctcactaagattaattttatacgattggtacataattagcaaaagtaccaattttggatacaaaagtgttgactacaagaatgaataattgtacgcgtggtgctagttaaatcgttttagttaataaaaaagtccaatcggactagactcaagttgtagtatcaaaaagaaaagagtctgatctgattgaactgccttaagcttaagcgttttagccaccatttacaagttagttttaaagatttagtgataatttgtcggcactggtatcgtttgtatgcaccggctgagtttactcatcggcgaaatattgatcaaattaaaactacggacagtctgattttggctttacttatctggcaagctaagacaggaattgaatcacaaagaagattctgtgaatgtttcaattgtttatcacactcacgttttaatcgacgttcacgtcagctattgcaattgatttatcagatacggcaagaaatgaataaaaaggttgacctgaatggacagttcttgatcattgacagctttccggtacctgtttgccaaccaattcgcaactatcgtgctaaaatttttcgcggttatgccaacattggttataaggccaccaagaaaatttacttctatggtttcaaagttcatgtcattgttagcgatgacggttacattcttgattatgtcgtaacaaaagcatcagttcatgatgccagggagacagttgaactgatggaaaatacccatccatctaattactatcttcttggcgacgaaggctatttaggcaaagaactgcatcaacagctaaaacaaatgggttatgaactttggacaccatatcgtaaaaatatgacaggagctaaaaagcacaatgatcatcaattgatggctattcgcagaacaattgaaagcgacttttcgcttctgacctattacaatgccgagaacaatcgagcacgtagtctgataggctttcaaagccggttggaaattgcaattttagcttataatttggcttattgtctagaacgatttaactagcaccacgcgtataattgtatattatatgtaaccaaatgtggtacacaaaattataaataaccatttttggaaacaaaaaagaaagagggaatattaaaaatgtccagtaatgtaacaaagcaaggtgaagtactatctaccttcaacgaaagtagtagtaaaagaaccccaattcaatcagcattaacaagaccgttggttgaagcaattggtaagtgttttctattgttgagcggaaccacagaagaagttcaagatcctaatgatgagtctaaaactattccgcgcgcagtatacgaagtaagagttattagctctaaaactagattacctattggaactgtgctaacggtgaaaattaaaggaggtaagagtgtaattactgatgaagagaataagaagttactgttaggcttagagaaaaataaggtagtagcattcgacgatctaagtcattggaactttaacggaaatgagggattatcagcttcaggtatgcgagtattagaagtcagtccgcaagaggctatgaatttatagaaatgaggcggcttatatgaaaataaaaaaattagtcttagataccaaaaacccgttaggcaatcctaacggggtaaaaatggcattaggagtaactttattatcttcaattggtcttgagtataaagttgcacctcaattcataaatgctggtaattataccgcattagcttatccatttttaattaatattatacctctagggtatccatgctggaaatgggttaatctccatatcgttaattataagatctataagcaattgatgaatattgttcattcggaacaattaatagactatggagataaaaaagaaactaccactttcggtgaaagaaaagttgaatatggtgtcaagatcgtctatgaagaaacggcagaaggtacatatattactgtatatcctaatggtataaaacatagcgacgccactcagacgctaaacaataggctagaggaaactttcaacatgaatgttttatcggtagatcatcagctagcttatacgaaatatttattgagaaatgtaaacagacaaagaatggaggtttctaatgataacttctaatttcgtaataaatcttgataagaatacatcattcagttttaaaggtagtggtgggattcttgtcactgggagaagtggctcaggcaagactaataccaccacatatataatgctgaaggcgatgtcccaatgtgattgcggtttatatattattgatgcaaaaagagctgatatgtatggacttcatcaatttttaaaagatggcaagaaggtagtggcaagtacaacaaatcaaatagcacgattgttgcgtgttcttaatgagaacatgagcgcacggtatgagcattttaagaatggaaaatggggacaggatttcgctgaatatggatatagaccatatttattagtcattgatgaagtatctgcgatgttggctggggctggtaagaataagaaagaaataatgggtgaattgcgtcaagttatccttcgtggacgacaagcagggatatttacccttatttcagggcagagaattgatgcaactattttagatcgtgatattaccttacagttaggtacaagaatcgtgatgggacaagcagattcggagacttatcgcatggcttacccaatggtaaatgatattaaagcattaccattagtacctaataagccggggtatggtcttatctattcagatgggcaaaaaattagcaatcctactccatttgtctcaccggatatgtctaacattgatgttccaggggtaattacgaggttagagaataattttgatccatctaaatatattgatgaatcaagctattgggaggtttagtaattgataagttgccagctggcgggcgacagagtcgcacgaatggaatgtccaagcgtgagcgggctggcaacacccaactaataatatgggtgtaacggaaagattattaatcatggaaacgatgaataatattaaaattgatcaacttcgtctaaatattccatatgatgaaatctatcaagtagaaaatagtcaaagtttacccaaagaagttatagtagctgataatctgctgcatctggcatggttgtttaagtctaatacagtgagtcatggacataatggctatacttcttcatataatttcggttcaggagaacaaggcggaaatatttccgtaatgtggaacgagtcaagaaaagatatgggaatactagtcgactttactgcgacaggcaaagcgctatatgaaagccttgctgaattacatggaattcctgttaattggaagaaaataattgaagaattatatgaaaaaatggggcatatatcgaggctagatatagctactgaccttattaattatggtttttcagttaacgaaattattcaaaggttaaagaatgaagaatcatttttcttgaatactcaaggaaataaaatcaatgctaatcgatttaagataattggaagctatagtgaagctcagactctatatatcggtagtagaaaaagtgatgcttttctgagaatttatgataaaaaagttgaacaggatcgagccgatggactctatagaaacttggctagaaactgtaacgattggataagagtagaagcagaatttaaacaccgtttagctaaagaactaggaaaatatattacaacattaactgcagataatatttatccttatttacttggctgtgtactagaacgttggtcattagttgatagggaagaataatgacatatgaaaaattccaatattctaaagaatggaagattttaaaagagttatcgaaaggacaaggacttcaagaactaaaacaagctcaagttgacgcttccctgaatagaaaaattaattggttcttgtatggtggtgccagtggagttattacgttgattaaagaaatttatggtgatgaagcactaaaaaagttttatcaatttttagattattttatttctaatcctgatacgttaggacattactaccactcggacaagataaaggcggatactaaaactattgcagattctacgcaaggcttgaactttggagaatatttagaagacttaaagagagaattagttgagggagataaacagaaaggcaggggctaatatgtttggcacagagttactcaacgctagacaaatagcagaagaattaggtattagctatacttacttttttaaattaattaaaaatgggtgtccttatcatcaacttggagaccaaggacgtaaatattacgttttaaaggaagtacaagagtggctattagtaagtagccaacattaattagaagacgtagcaacttgctacgcttttttaggagaaagctatgtcaattacacaaattaaaacggggaaaaataaaggaaaataccgtgttagaattcaacctactgataatgaaacaggtaaaactattccgattcctagtaaagtaacaaaaactagcagtaagcgtgaagcaaaacaattagaagaacaaatgtgggtgcaatatcgcgcgcataaagaaatgaatttaaatgtattagatcaaccacttgcaaaagctttagatcactatgtagaagaagaaagaagttcggggcgttggtcatcgattactacgtatgataattggaaatatacggttaagcttgtttctcaatatttcggaaagaaaaaagttaaagatatcaaagaaaaagatatgcgtagttttgctagaaattacataagtacacataaagcaactgtggcacctcattcaacgctagatagacagttacaaaatttaaggagttattttgctactttgaaggaatatggtgtcttaaagaatcctattcctatgaagccattaactaagttttttagacgtgatgaaatgaatgcccctgttaagaaatatgttttcactaataatgaaattaatgttcttaaagatagaatttatagagagcttggagtaacaagaataagttattggacaactagaattgctatcttgatagctctagatactggaatgagacctcaagaaattcaggctttaaagtggagtcaaattactaatgatggaagttttaaagtttttagaataaatgactcatggaatgaaaaagagaagcatcttaacggacatttgaaaagtcgaccgcatggagaatctagactaacccttcccctttctgaaccacttttgcagttattgaataagtttcgtcattgtcagttagaacttttaaaggagaatggtttaactaattttaatgatcgaattttattgaacatcacagattatcacttgtgcgcattagggtatccaataactcaaaaaagtatgaatgatatgttgaaacagttgagtaagaaagtaggggttaataatcaaaatttaaatataagtatgtatacttgtcgtcatactgtagcaacaaaattagggaatacaccaggcatgtcttacccttgggcggcaagcagattagggcattctttaaagatgtttatgcggacatatgtacatgttgatgaagatcgaaatgaagaaatgcttagattgatagctaaaagataaaagaaaaatgcaaaaataacttatatttgataaaaaaatgaattaatgtagtaatagcaagaatttgaaaataataaataacaaataatttttaacattttatagattttgaaaaaaaaagagcgtatactcagggcatcataaagagatgtgaaggagaaatcaaaatggttattgtagaacaaaagtttaataaatataatcatacaagcaacatggatgctatggagtacgctgcaggatgttgcacatgtacaacaacaagttgtacaacttcatgtgccgctgtagctgaaagttaatggatagttggcgctgtaaattatattacagtgctttttttaggagtataaatactgttatgtgtctattaagaataaaagacttaaaagttaattttaaggatcaaacagtactggattttagaggtcatgatatagagataaagtcaggagacaaagtagctctaattggaaaaaatggggcaggaaaaagtacactattaaattgtcttttacatgaagtaaaatacactggctgtataaaggagaagtatcatcagtcggatataggagtagtttttcaagaaaatgtatattttaaattcttgaaagtttatgaaatctttgaattagtgtggaataaacctaaaaagttaattttaaaatctaaatttattaagaattttaatttagcaagcattatgaataaatacatttctgacttatctggtggtgaaaaacagagattaacaatagctttggttttttctcaaaataaaaagatttacttactagatgaaataaattccggcttagattatgataacaggcatgaattaagtaaaatcataaataatattactgaagaaaaaacagtaatacaaataagtcattattttgaagaagttgaaaattgggctaataaattgataatccttgatagaggcaagatgatatattttggaagcttatctaagttttattctataaataagcatgattcattaattattataaatgataaaaaaagcctatctagactgacccagaagcctttaaatctttatagtaataaatatattgtatctagtagtattgatgagagacatgatataacaaatttattagagcaacaaaagatagattataaagtggtgccacaaaatttatacacaacttataaattagcattagtaaaacatgaggataggtaaaataatggctagagaaattttattaagtttaaaagcacaacttagagttccaattgctgtatttttttctattttttttccaattattatgatgattatgatgatgacatcttacggtaatttttcattaagaaatggatatcactttatagataagtatttttttattagtactactataggtattctacctctaaccttaattagttttcctattgatataaataatttgcttgaaactaagcattacttacgtttgaaatacttaaatgttgatttaaaaaaattatttttatcaaatattatttcttatttgataattgtatttatttcagttggaataaatttaatagtaggaaaaagtatatataatttaagattacctagtatagagtatttatgttatttttttattcaattattctattgtgcgatagttctacttatatttggcttactgttaagtttaatagtatcagatatcaaagctttaatgcctgtaggaatgactataatgtttatattatttatggttataggtgtttttgtacagtatagctccttaccgaaaattatacgtactatttctagctacataccagtaaaatatttggcaaatgatttctattatatctggattggtcaggctaaatggaatatgccattttttaaatgtaatacgatctggcttatttttctgtgtttgatttgttacataatttatagaaggaagaataatgttacgaagattttcaactagtaaggatttaagaattgggatagagataatagttggaatcactttatcatttatcattaattttataatgatttcaattgggtatgccattacaaatagtgaaaaattaaaagaatattcggtcaattattttggattagtcatatataaaataaagaattatggaaataaaggtataccagtttccaataatatgatgtttatcggaatagttttaacaataatatttgtttttattgtagagtgggttgtatataagagggataagaatggtagagtatgagcttaaaggattatttaatcaaaatacgctttcaacatcagatattagtaataataataattacaataatcaacaattatttgatcatattataagaggaaatgctaattctgagatgctgacatacttacttaatatgaaccatcagcgattgaatgattttaagagtatgcatcaatataattatggaaattttgcatccttaatgaacagtgtagaacagtataacgaaatagaaaatgatgaaactattttgctacctaagccattgagaataaaaaataagttacagcaggttctaaagaaaagaaaaagtgttagaaattatataggcttatcatgtgatttacgagaattgtccacaatattgatgtattcatttggaatctcgggaagaaaagagaattttggtggaatagtcgcaagtatgcgatattacgcttctggaggtgctctatatccaatttcagtgattatatatataaataaggtggatggattgaaaaaggggctgtatttatatcagccaatgtatcattccttattaccactaaatattaaaactcaaatcgatattaataaattatttgtaggaagtaacattgatgttaaaaatagtagcttttttgtattttataaatatgcgattagttctacatatttaaaatatggtgagctatctttagctaatattttgattgaagcgggaatgatggcgcaaaatttttccttagtaactacagcatgtggttttgggtcatgtccaattgcaggatataacaaaagatttattgaagatatttgtaatttagatcatgttaatgagcatataatttttactgaaagttgtgggagaaatgaatagcgatacgattttttttgtaaaaaaagatacacatattaattctaatataaacgaatggatattaagtaagggaataattcataaaagcactttaacaataagtaaaaatgaaagtagtactttgtttgtaagtttattcaagcaattaatacaaaatcaggaaattaaagttagtgaagatgatgaagagtattcagactttaaaaaacttgttcagcttggatttttaggaataagaaataaaaataaaaaagtagcacttattgtggaagaaagtgcaaaaaacttctttgaaaactatttaaaagatgaaaatatatgtgttagctcattagatgagtttataactcaagatacattaaatattttaattgaagaaaaaaataatactaaattaaataaaatagttcaaaactataaaaataaatacaaagatgtagatttgatttttgtttgttctttgtattatgaaaattatttaaaaggaatcaacaagctaactaaattaattagtatcccatataatataggattttatgataataataatatatttgctactagaataatacatggagagactggctgctatcaatgtcttgaaaatcaaatactacaaaaatttgatggatatatcgaagattatgtatcagaaatggattctgaaaaacaagtatttgatataaaaaattatggagtattaatatctataattaagtcagagatagaagaactaaatttatactctgatacagagctacgaggaaatgttcttcatttttatttacctacttatgaatacaattttgataagaatagaattcaaagtgattgctcagtttgttctactataaataatattttatttaaagaacaaaatatgaaagcgtgcaatattttagccgaggttttaggtaatgataaatatcaagaataatttagaatataatttattgcgtcaacggatcttgggtggcgctataactggaatctggaaaaaggatactttctttattggcgaaagttcgtatccggtaatgaattataattatattactgcaaactttactaattttgaaaaattcgcttttcctggctatgttcccccgattaattatcatcttagtggctacggcttatcttataataaagctttatcggcttttctaggtgaaagtacagaaagatattctttttcagtcttatatcagaacattaagcataatatcatttattctgattatcaaaatcttcagaaaaagtattctaattgttatatagtacctttaaattatattaatatttatttttcaaaagaagataaagaaaattatataactaaaaaagatccaataagatggatagcattaaattcactatttgatattaataaaaaggtactagttccgcttcagttttatattatgtataccaacagtatatttaaaaatgaaaaaagaattgtaaatagtgctacatcaacaggaactgcttcgcaagaaagctttgataaaagtctggaaaatgccatagttgagttcttacaaatagattcttttaatctttggtggtatggaggtctaagaggtaaaaatttaaatattgatacagaaggcttattaaaggaattgttcccaaacaataatagactttggatgtttttaaaaaaatttacggttaattttatagatattagttttgacaaagcaattaatgtagttgtttgcgaaattaccagtaatagtgatagtaaactacctaaatatgtagtaggagttcaaggaggattttgtttaaataagtgtattgaacgatccttttttgaatgtgtaactgttttagaatattgttttactcaaagttgggttgaaggttctaaatttaaaaagatttctacaaatatagatgatttaaatgtaaataatttagacgataatgtattgttttatgctaaaaatggaaagcctaaattaatcaaaaaagagaatattttaagagtgtccaaaaaggttactaatttaaaagatttgcttttgaatttaaagagcatctctaagtatgcaggatatttaaatattacgcctccagaatttagaaatcaaaactttgaaatatgtagagtatttataccagagcttttaccaatttctttaccgtcttatccgccttattatcatccaagatacagtaaaataggaggtattattaataatgtcccccatcctttggcttaaaatagcttttttcatcactttgtttccaggcggaatatatttgataataagaagaatattgtccagccatagaaaaagcataacagtatatttaataaccttggtaattgtagctattgtaaataccattattttaaagatcaattttaataggtatattgaaatcatcttaatattgattattccttttacgtattatttttttgagtatgttataaggtataaaagattcaatatcttaagttttaaggctaataaaacaattatttatgttttagttttttttcctatatttgaagaagttgtttaccgtttctttatatttaaatattgttcggttttaggcttttctggaatacaggctatgatatttgcaacgttatgctttgaattttcgcacatatattatttaggctttaaagctattaataaattatttttttcctttattcaaagtatgttgtttttggtttttcaaagtttattgttaataatatgtttacacataatttttaatttatatgtgtatttacacaaaaaagatatgtataaagttattttttgatattgacttgtattacgtatataacaatatgtgccacacggtttctagaaaaatcctaaagagtgctaattttaaaagcaaaaattgttaagccttttacgcttctagtcagcattagaaatacgtttaagtctttcaaataagttcaatgaagcttgatttgaaaggcttttttgctactttgaactagaatgaaattctttgaaataataaggatttatttgaaattaacacaattcaaacacacagatacgattcatgtgttaagaatgtgcttgaaggaaaattaagagtactaaatatagtgatttaacaggcgttggagcctgttttttttgtgtttggttagggcattttgtttaaattaaattcagtggatttttgtgcaaaaaaatagccatattgtagggttatacatattgactattttctattattaaaattatttcaattcagccacaaacctaattccttgataagaaggaaacttgtaattatcccatgaaaaataagtgtctggaaattagttctttctatttaatctcaatgctatttcaagttagctattaatctgtatcctaagaatccattgctagattttggattccaagcaatacctacaccaatttttgtatattgaccagataaaagaatgtctctatgtccccaattagatcctgcatcatgataaatgaaattatttaagcaaatttttgcttgtgtagatggggtatcagtattatcaactgcacctccagcaagcacttctgcgtattgagtgcggcttccgtctggccttgtatggctaaaacttgtatttgcttcggtagctctagtccttgcatattcttgcagagaagtatcaagtgttaaagaatttagtccctttgattgacgtaattgatttaattgcgcaataaattcttgttctaatttggtagcaaaatcagaatccttaatgtttgtatattcattattgggttttgtatttgtggtttcattatgcttaataaaattgcttgaattagcactttgagtatttgtttcatcggatgtacttttagtaatagcagatgttttagaagtgtcaggttctgaaactttgtgagttaattctgaactaatccatttgttagttccaactttgtaccatgttttaccacggctatccttcttttctgcataaacatataagtattttttaccatgaattattttagtgcggtaagcttttacacttctgcctttcttgagtgttcttgctcctttaatacgcttgcctttatagttgtaaacataagcattgtgagtaagttttacgctgctagtgcttgcttctactacattggcttgttcgttgccagcaacaactgtagctgaaagcaatagagctgatgaaagcgtaatggttgatagtaatttagtaacgtttttcttttgtaacatggtagttacctcctatattccttatttcagattagcaataagactgtaccctaaaaatccgttacttaatacgggatcgaaagcaaatccaactccaatttttgtatattgactagataaaagaatgtctctatgtccccaattagatcctgcatcatgatagatgaagcttctcaattgttggctggcttcttgctctggtgtacttgtgtcgttaactgttcctcctgcaagtacttctgcatattgagttctacttccatcgggtctaatatggtcaaatttagtattggcttcattagctctggttactgcataagattgaagtgtattatctatgcttaatggcgctaacccattggatctacgtaattcatttaattgagttacaaaagattgttcagtttcatttgcaaagtttgagtttatgatatttgaatacgtctgttcatttgaagccgaattattatcttgttgagtaatactttgtgaatctgctttttgacagtttttggaactatttctttttgtataaaatttatcagtgtcagtagcaagtatccatttgttatcaccaattttataccaaattttatcgttaactttttcttgagcataaacttttacagattgtccgactccaatgtattcgccagtaggtgattgattgggagctttatatgtttcacccaatccattatctgtaatttttgcagtgaacaaataatttgattttgtgttttgcacatttgcgagcctgatatagtgatgactaccaatgtataaatattttgtgccacgtattttcttagtgcgataggcttttacatatttgccttttttgagtaatttaacacctctaatacggttgcctttgtagttatagacataagcattatgcgtaagtcttacatttttagtgcttgcttccactacattagcttgttcgttacttgtaacaactgtagctgaaagcaatagagtggatgaaagtgtaatggtcgatagtaatttaacaacttttttcttttgtaacatattagttacctcctacggatattcattatttcaatttctaaattaatgatacatgatgtgaaaatgcatttcactgctgtttttctttgctggaattatatttatctctcgtaaatttataaaaaagtaaaagattgaaaagttaggtgcatcatttaatacaaaatataaactgaaatagattctcgttgaatttggaaactgtcaaatcttttgtgtaaatagttctttctcgtaaattgattttttaattatttatttaatcaaagtaggattctaaggtgtcctgaacctgaccaaagcctttatgaattcgattgaaataacggtcattgtagctcattgcctgaatgccaataaaagcatcaagcgactgttcagttggaaactctgccttaggcttagctttgcgcttgatcacattgttaaatgattcaatcatgttagtcgaataaattgaagctctgatctgcttgggatagttataaaagaccagcagatctggttctatgtctttcaagcttctgataacatggctgtaaaccttgccccatttggtatagaagtcatgcaggacagctgtggcttcttctttgtttgtctgttgatgcacctgtttgaattcgttcatgatcttttcacgatcgtcgacgcgtactttagcgcagatattgcgcatgacatgaaccaaacagcgttgaaaatgagctttaggataagtcctggccaaggctgttttcatgccaacaacaccatcagaaagaaaaagctcaacttgctttaagcctcgggatttcatgttttgaagcatatctgtccagacttcaatgttctcgctaggcgcaatgcagtagtcaatgacctccttgtgcccattaggcttgatgccaatggcaatatagactgcttcacgctcaaatgtttctcggcgcaaaggaaggtatgtcgcatccaaatagacgcagaaaaacttgtcgcttagcttgcgtttgtggtaagcctcaacctttggaatcatctgcttggaaatatttgatacctgagctggactgtaatggctgccatacatcttttcaattagatcggctatttccctggtggtcacgcccttggagtaaagcttgataatcatgctttccaagatatccgagtgctgcttgtagtcaggcagcgtgtgctgatgaaattgaccgttgcgatcccggggcacttgcacttcaattgggccaaattgcgtatcaactttgcggaaataagcaccatttctagagttgccagtattccagccatttctggcatagggatcatagcccagaaaggcagtcaattcagcttctaacaagttattaacagcctgttgtagctctttgcgcaataaatcatttattttgtctggattgaatagagcttgagcaaaatctttggtaaaatcattcatgaaggagttcttctttctgtatgtgtttttttgttcaaaccaatcatacgagaaaggaactcctttttctaatgtttaaagaaataaatttaaggaatcattcatccttacacaaactattttacagtctcttaatttgacaagcaatatacagaaattatcaataaaaagtacgttttgctataccttttcataaacctgactacaatgagagttgaagaaggcgtttttgtatgacaaaagaatatgaaaaagaagtcaaagaagcagaaagcgtattggaggaccaaaagttaactgatagtgagatttcacaagaattgatttccaaagataatccaactgaaaatgtaaaaccatctgagattgatttcttgcgtaaaaagccaaatttgacaacgcaaattgatttcactttgttagctgatcttgctgggttatccaaggaagctaaggcagaagcggctgtatagataaaaattttacgtagaaaaaagaccggtttgaaccgatctttatcttataaaaatttactttaggagcgtttgtgaaacttagctactccccaactgattagatagaaagtcgaaatcaaaatgaattgaatttttaattctaaaatgaatagtggaaagtaaaataaaacggaaaacaatagaataatagcgtaaattccttcgaatgttagaaataatctgtttctttttctatttttaagtgttgctagtatcattttttcattcacaaagatccctcctaaaaattatgaaattaagaccaacttaaataaggaatagtccatcggataggaacacctaggagccaatgtccggagctgagaaaagtgttttttaacacaacggtagtaacaattgcaataactgcgagtactaccaataagattagtaatgtactttgtttaatttttgacatgattaatgcatcctcctaatattttttaaacttctattattttgctgggataatgaccggtaattgccaccacattactgtagcctcctcccttttttaatcatttagtcggtttggttaaatactactccttagtgactagaacagattaattttgtatcacatagtttacaaattatttgggccaagttttaattaaatcttgataaccatatttttgtacttcatttctaattttttgcgcttcctctttattgtttaaaaataaattctttaaatataaagcagcaatcttataaagcaaaaaatgtatggttggttttgattccatgatgtagtcaattatttttggaacatgcattaattgaagtgattttttagaaagttttctattatagcaaaccgctagataattctcgaagacacgcaagtatctttcttgttctaattcggagatatttttattgcttttcatctcgttaagtagtctattgataaaaaatgcaagggtatcttgttcccagagcggcattgtattagtaaaaagtcgcagtaattcaggattagtcatccagttttgtccttcgttaaattcaatgaatagatctttttttattttgggatcgatttgatttaatttattttttaaatatgctacagaaatcatagctcttaattttaaaatcttagagtgagattgtgacagaatttcttgatagcatgattcaatttcatcaatttttcctacattgaaggcttgttccattttattatttaaatctgattcaatctttttttgctttgaagtataggttgctcgcaataattggtaaaagtaagtaatatcaacatcatgttcaaaaagaatcgcggctaatttatctgcactaattctgctttttcccgcttctactttcgcataaaaaggccgagtaacaatgttagcagccatttctttttgagtgaggtctagattttgtctaatttttcgtagtgcttgtccaatagtcataaaaaatcctttactctaaaatattttcttctctacgatatatgattattataaatgatgaaaatataagcggataaattaaagagaactatggatatcggaacggcattaagacatttgagagatgatctaggtttgacacaaaagcaaatgattcaggggacgaaaataactgttagtcactattctaaattagagaagggacaaaacaggatatttatcgaaaacctagtcgagatattgaagcaacgaaatatttctttatcatattttgttgatcactatcttaatgatgaaaatagtgaaaaagaagtaaattattcagaaatattaaatattgctttttacgaaaaagataagatcgctgctgaagaaataaaacgacaaattttttcagataagagttctagcaatgaattgagagatagagcaacattaattgtggatatgatagacaaccagggacagagtaatgttgatgctcgaatcattaattctattttcaaacatgacaactggactcagtatgacgaggcaataatattattgggtaatattattagaactagtaatgtattaaatatgagtcctttggtattgactctaattagaaaatataaagatctagataaagaaaaaatcgaaaaacaaagaaggttagcaacggttggaattaattatttatttaattttcgaaagttaagtaaagagtttaataaaactgtgctaaaaattataagctggattaaaacaacatcgattgttcctgagttaggcattattcgagaattaaatgcatattttttagcagtttatgaaggaaacatttctgtctcaactaatatcaaaaatgtccttaaaatatcaggttatcaaaatcttgctaatgatttacctaattaatcccctgagaggggattgagttgctgtggaatgagaagtagataaaatcatagttaattaaatatgaaagagaggcatagtaatttgattattgttagttatccagttttacctgaataactctgagttcatacagtacgaggagatataaattatgaaaaaaagattttgttaagcctaagtttagtagtattaggaaatactttgttttttaattcgagtgtagcttctgcagcgactaataatagatattccgtaaataatacaattcgtcaggcacctaatactggcgatgttcctggtggatggggcattactcctggtcatacacattggggctaagtgatagaagcgatgaatgaattttcattgctctttttattttgggatgcgaattttatgaagaaaagtaaaatcatatttttaatagagcttgtattaaatattattgctgctgtttttctagtaataaataattcattcaaaaatttattagatgtaggcgttgtatttttactacttctattgcttatttggaattttttaagaagaaaaattgagattagtttaaaactatcatggctcaatcttatgatattaccagcaatttttacttattgcttaaatactgtagctaatgttttattggtaaaatatcctgttaaaagtgttttaatagctataatttatagtttgttattcttagtttatttgcttccggtagtaattactaatgcgggattggttaagaataagtatgctagagtttttattgcaatgtattatattgtgctattactttttagcgaaaacttacatatgaatgactacttatcatcctttgtaaattggtctcactctgaaattcttaatgggttagcgttaattccaatcatattttgcttatttaaaagttgggatattcgagcaaagcttaatcttaaatttaggcgatattcaaatatacagttaatagttttattagtagctgtattctttgctgcttggtattccttctttcatagctatgtttatattgcaccaactttttcgcaattattttggaattgggacttctcggaaattatcccaactgaacgagctgttttatggagtttaggagcgattttattcgaagaaggattccggtatctattaataattgtattgcttgaagtttttaaagtgcaaaggggtcaaattgactattttcttgagtgcgctattttttggattgatacattatgccggactacttgaccaaggcccaatatttataatttcaacgcaagcaatttttgcttttggttatggctgctttttggcgacactgtacttatattctggaaaattctggttagtattgctttcacatttttcattagatcttattgcattctcgctttctgcaggtggtggcggaatactatcatggtatggcaataatgatctcttgagtaatggtttgagcatggtttttgctttagttatgacattgattatgtttttaggtaaacaaaggaaaattatgcaagaaaatgctgctagattaattaatgcatgatgcatttaagatggtcgaaagatcatcttttttatgcaataaagtgtcatatataattgacacctactataaaagttgctattattttaaaaacgtcacatataaatgacatctaactagatgaataaagaagaattcaatgaatcgagtaagggaatatcgtaagcaaaagcaaatatcacaaatggagcttgctagacgaataggggtggcaaggcaaaccattaatttgattgagaatgataagtataatccatcgttagaattatgcctaaacttggcgcatgcattaggaacggatttgaatactttgttttgggatggggatgaagcaaaatgagacgagaaagtttatggcttaagtttgtcagatattggtatggcattgatagtaaattagacgagcggcaattagcagaggttgaacgaatcggtaataatgcctatgtaatctctggtatagtggaactgatcttactggttatcacgctaattatggcattgactattaaaagtgagctggctttgtggtttttacctttggcgattgcaattatgatgctgatgatgagtgcttatacttatttgacaatgcgaaaatttaaaatattctctgtcgaaattacagcagatgaacgccccaaagcaattcgtagaatatggataaaggctataatagcgggaataattggtgcagtttttggtacattaggtagcgcgctaggagcttcttctgtgcaaaataatctagtaaatgtgcttgatttttggccacaaggtttatggctaggcgtatgttgcggtgctggtagtgcgattggaagagtgcaacgattgaaagtaattaaagaagacgaataagcgaatcgaaagtagtcgatccgctttttttgctgaaaaactatataattaaagtaacaataaaatttacagcaaggcaaaaaggatgaaaaaacaaaataagactggctcaattggcgtagtgggtgccacggccatcggtgttggtggcatgatgggagcaggcctatatacattgctcggcttggccgccaactctgctggtgtttggctgccagtatcatttctaattggaggcattgtggccgcattttcagtttattcgtattcaaagttaggaatgaagtatccagatcgaggcggtgccgctaagtttttgctaaaagaattcggagatggcctgctagctggtgggatgaacgtcttccagtatatcggctggattatcgccatggcgttatatgcgaccggatttgcggaatatgcctgccaactattgggaaaatcaagctcaggctggctaggtaaggcaatcagtatcggaattgtcatcgtggttgtggcaattaatattatgggttcaaagcaagtggcacgtgcgcaaacggcaattattgcgtttgaattgttaatcttactgtcttttgtagcggtaggtttaactaagctgcatgtgccgacaattactagttcaaatagcggcaatattgtaggtatcctatctgctgcgggtttactttacgtaacttatgaaggttttggcgtagttactaacgctgcagggagtatggtaaatcctaaaaagcagttgccacaagcgctgttcttttcattagggatcgtcatggtgatttacattgtagctagtgtagtcgtggtgatgaccttaggcgttcaaggcgcagtagctaatcaaggccacgttttggcaacggctggtaagctagtattaggcaactggggtctgttcatcacttcactgattgtctgcatcttcgttgtgattttcccattatcagctgttggtgagatggccagcctagcctttttattggtgtatgccatggttaacttaggccacttgcgcattgcaggacaaactggggccaagcgctggattttgatttgctctgttgtattgaatctagctttgtttgctttgttgtttattcagacaattctcaaccacgaaactttaacttggatttcagtaattgctttgttaattattagttttttagttgaacttgcttggcgaaaaaagaataaacgcaacctgcattgattaggaaaaaaatagtaatttatgatacaaaaagtcgacttttgttccacttattgggtacaaaagtcggctttttgtttttttcgttgtcaaaacaatatctttaatattttaattcagatatactctctttgatcaagtttgaagtgagggaaaatgaatgaaaaagttattgatcggaagcgcagtcttagctgccttattaattaaagaaaatatcgcagtaaatgcggcaatagagcaaaacgaaacaacgcctaagattgcagttactgacaaaaaagagaagccaaaagaccagtctgataatagttttgcaggtcattatgaccaagagacaaattttattacctgggaaataaggctgaatcccaagaaagaaaaatatactggtgatttgaagttggaaaatttaattccagaaggcttagttctagatccagatacgattgaagtaattaagaatgataattttattcaaaattctagtttagttaaattgaagaaaaacaaattaacagctgaatttcctgctaagaagtattcagagagcacaattttgattaagtatcgaaccaaggtggaagcagagcctaatgagcctaattatcttcgggtgagtcagtcctttactttgggcgatgatcgagttcaagaatacgagcaagaaattaaatacgatcgaagtaataagaattttaacattgaagcgccacataaatctacgtttagagatgataatcaaatttcgttaattaaaaaatctaaaagtaatgaagaacgctctgaagattggcttaaacgtctagcagagctgattattaataaaaaagaaactacttcagataaaggaggtgaaaaagttcaaggacaggtcaaagatcaaaagcagcaagcttccccagaaaatacaaacctttcacgcactccaactgtcaaaggcttgactggttttgatactaaggctaacgaggtaaaatccacagctaaaatagattctgattcagtaaaaactactctagataaagacgagattaaggacaatgcaagtactatctcgcctaagtcgcaaaaacacgatactcatgtcacactccctaaaagtgacacatcagaaactaaggcaaaattacctaaagctggtgaaactgccggtgttatgctcagcgtatttggcataattttaataattgcagggtggacagttcgaacaaaattcttaaaataatctatatttgtactaaaatacggattttcaatagccaaaatagactctttcacgtattatttagatagataaacttgtatcatgaaagagaaacaaacatgccgtacactatttcagaaattattgttttattttttacttattcagttatcggctggctttgggaaaccttttattgttcgatcaaagaccaccattatgattatcggggatttctgtttggtccttactgccccgtatatgggttcgccgttactacaattttaatttgtaccaaagacgtgcgagataacctgctccttttatttatagtagggactatcgttgccactattttcgaatttgtggctagttggctattagagacaatctttcacatgaagctttggaattattcaaaattatggggtaacattcaaggtcgagtggccccaatgatttcattattttggggcgttggtgtagttttattagtaaaatttattcagccaatcattcagaagctcattaataatgaagaaaagataactcatggctggctagctgtgggtattaccattgttatgggtattgacttagtattaacagtaatcagtgtcgagagattccatactacaactaagatgtgggatgtgcatgttaaccactttattgagcgagttagaactaaagtagaaagtcatatgcctgagaaaggaaaattgcgggttggtgattggcaccactcagtgatgcagcactatgatgaattacaaccgcaacgattaagctggaatcataagcgctacttgaagagctttccaaaattaaaagttactgatgctcctaagttcatggaaattaagaaagaagtcttgaagaaagaaagctaactaacataatcttattttgtgggattgaaaaaagtcggatgatcatattaggtcatccgactttttcttatccattaattctatttggttcacgttttttactttttatttcggtgtagttatctaaaacgttggcatagcgtccaagggtgaaaaggtaatcagataatcgattgaggtattttaatacgtcatctgataattcctgttcatttaaacttaatttgaccaatataatagcaacaccatcaactcctgaaactactgaagaagaacatctgacagtaaaagatcatgtgggttcatcaactttaagaagaggattaccacaaactggtgaaaagaaatctactttgaatgcaggctttgcccttgctggcataggcttggctttgcttgcagggatgttgtttgatcctaaaaagaagcactaatactgaataagaattaagttcgttaaagatcgaatcattttgggttcgatcttttttagtaacaaaatttaaaaaatcccaccttcgtgaataattgaatactttatatatttcaatcgtccactttagtgggattgtattaattcaggatgatctttttgaatttcctgtttttgaagggcagaccaagtccatggaagagttttttagtcgcctagaaactataggcaaggcttggcataaagcctatgataccattgattccgatacagatagagtcattaagagaactaaaatggatgctcgtactacgttagacctactagaacatctatcacctgtacagttctcttgaagagaaaaagaatatcagcacgtcaccagtatggttcttagactatgatcaaaaaatttattgtactgatgatgccatcattggtcagatgcttcaaaccattaatcatgacattacccgacgcagcagtcgtagcttattacactggaaaattcttaaacaaaattgttccagaaatttttatttttgatggatattattttttgcttggttctaagcgattttatttatcaaagttaatagttctatgttatattataagtgttataataatgtaaaaattattaagcattgaaatatagtgcattatgatacgaggagaaagatcatgttagaaagagtcccaaaatatacactaagaaaactgtcagttggcttggcctcagtgatgattggatcaggaatactgatgaactctccaaaggtacttgctgatactattaaaccaaatgaaggtactagtactgctgttcaaccttctagtcaagataaagataatagtgagccaagtactcaatctggtgctactcaagatgaaaacattgattctaacgcagctgttcaagagagaagcgacaactcagttactgaaccagcaaccacaactaatgctgaagaaaaagtagtggcaacaaatacccaagatactacgcaagataaagacaagcagacaaatgcgaatgaaactacgcaaaatactaccaatgtcgacaaaaaagatactgaagtaacgccgactaacgacgcaacaacagctacaccgaagacaaccgccaaggttaacgcaccggctgcaccaacagcaatgaaggcagcagctactgctgaaacaccagatccaacggttccagataactcagctaatactgctattatcaatgacaagaatagtttggaaaaaatttggcttgaaacatctactgcgcgggcccaggtctacactaccgttaagggaactgatcaaaaaatctatgtcagttcctatgcagaattcggtaagcgacttaattcattaatttttactaatcgctttgatccaaatagtctagaattacacattgaatatcaggtgttaaaggatagggttcaaaatttcattgtaaattggggagactggctccgactagataccagtagaattggtaaagatggtctaactttcactacagatacaggtgaaaaagtagcctatacgttaacaccaggatggggggaagtacaaaacctatgatgaatggcttagtgaaggccaagatatgagtaagataaatgctcttaaaattggcaacaatttaaaggccgggactaacttcgtattaaccgttcccctaaaatatattggtagaactgatggcacaaagcaatttaacaatgttcaagttgtagattacgggcagccaaatgctaatatggtgttcgattttattgaattacatccagagcaaatcgatactccagaagctccaactactgataaagagtcagttactaccggtatctataacaatccgttagctactgctacagactggtataaaacggagcatggtgaatatgttgcatactatacagctaaagggaaagatggtaagacctatgtaactggatatgtggctgccaatggtaagtctgagtcgattatcaatgttgatcagattgatctaaataccttggaataccatatgatttaccgtaatggtgacgaagaagtagcggccggtatttcagcaagctttgctgatggtaagactctagtggttgatgctagtcgtataggtgctgatggtatccgtttgaagagtcaacagggttggtcttataacaacgggggttatagagagaatactagtgggagactctattatagttgggaagattttcttaagaaccataacggatcggtagataacctcgttggcatcaatatgaatgcatccgctttcaagccgggcgatacaattgaagtagttgttcctgttaggtatattgggaaactttctgatcaagttcaatccttagaatttaaatctgaagctagaaaagatgtttcggttaaactctacttcacaactgtgcgcaaggacttaagccaggttaagcaggtagtcttgcttccgactgagttcatgggagaacaacctggtcaatcaaactggaagctggttaaggaaattgaaaaagatatgccaaatgggtgggaggccattaaaattagtaacttcccaacctataagggatcattcaatatggattcactaccaaaaggggacttaccatcggttgtttatggctctgcgcaatactttgttgacctccaagaaattcagaaaatttttgctaaccatggttacacggtcaagtatgctaacaacaacggtaaagctcaggaaatgccattctatggatacgttaccctgccactggcccttattgatggtggtggtaaacctgttgccccatctatctggacaatccaagttcaagctgtgcctgctattattttaaataaagatcaacactatgtggcagatccgaatgctaagccatgggacaccacttcaatgattgatgagatttatgctgctgatgacgcaggacagcggaagacgcgcgatcaactagaaaagttgccaaagacggacgtggatattagttatgaataccaagctccaggggctgctacagctgctccggttgataaggtcgacttgactaaggcgggggtatacactgtcacttacagtcatacttatgctgatgggcgagtagttaaggatagtcgcaaggtttatgttgatgatgttaagcaagaaaccaaggacattactcgaacaattattgtccacgagccaaacggaactgaccaaacagttatccaaaaagcaacattgacacggaaagtaattcttgatgcaactactggggaaatcaaatctgtgggtggatggtctactgctaagtgggaaagatactcagctccagaatttaaaggttacactccagccccggctcaaattgatgaaactgctgtgaacaaggacactcaggatacaactgttgagattagctatacagctaatgagatcacaaagccagaaaccaaggacattactcgaacaattattgtccacgagccaaacggaactgaccaaaaagttatcccaaaagcaacattgacacgggaagtgattctttatgcacctactgggaaaatcaaatctgtgggtgaatggtctactgctaagtgggaaagatactcagctccagaatttgaagattacactccagccccagctcaaattgatgaaactgctgtgaacaaggacactcaggatacaactgttgagattagctatacagctaatgagatcacaaagccagaaaccaaggacattactcgaacaattattgtccacacgccaagcggaactgaccaaaaagttatccaaaaagcaacattgacacgggaagtgattctttatgcacctactgggaaaatcaaatctgtgggtgaatggtctactgctaagtgggaaagatactcagctccagaatttaaaggttacactccagccccagctcaaattgatgaaactactgtgaacgagaacactcaggatacaactgttgagattagctatacagctaatgagaccccagagcaaccagataacagcaaggacaaaggtaataatgacaacaatggtggtaacaattcagatgcgattgtgccaataaatcctagtgacaataactcaaataattcaaataatgcaccaactgacaataagaagactgatgacaccaagaaagataatactggcaagaagattacaaaggagactcctaagaaggtaaagaataataagtctaacaagaccaaatcaacgactacttctaaatctaaccagtcttcaaaggctaagcgaaccactaaatctggtacgattagtcctaaggcagtcgctttagctaatactactgctggtctagctacttcagctaaggcaaatatggaaaacggtattgccaagaacaacagccaaaattctcaaactttgccacagactggtgaaaatgaaagtaaggtagcatttgccgttgccgggttgttagcagctgctttgggcatttttggtatagctattaatcataaaaaagaaaattaattagctaagttgaataaatcatacaaaaagacgcatagaatagcaatgtcattaagttaagacattgacgaaaatcagactttatgaaccgaattattttggctctttgtcaaacaccctaaagtataaaggtagatagaaacatgacgatgtttttatctaccttttttcttatacttagattgagcttgcggttgaacccttcaaggcagccgttagaataaggcagttttgctccattaagcacagcttttaggttatgtttaaaggtcaatagtgttttgtgcattaaagtcccaatttgatcttggcagttgattaataagttgagctcatgagtattgcccgtttcaacggcttgaataaagctttgcatcaggttatatgaattctctaaggtagtgctggtattgatgccttctgtaactacttgtgcttgagttaagcagtctttgtagtgccagttatagtgaggatgaactttttcaagttcatcaaacttcttcaagtataatttccaaggagacttaagcagctgatattgccgcgatcttttatcaaaggtcttcatgacttggaacctcagcgagttgaatgagcgcgtaagcatttgaatcatgtgaaaacgatcaatgacaatctgtgcattaggaaaacaagctctaacgatatcttgatagtaaaaattaagatccatcgtgaccgttttaacgttagctctagcttggagcgagaaacgaccaaaatacttaagcagcgtcttcttgtagcgagttctaagaatctgaacgacttgatgattatcaccatccaggcagataaagtgcagctggcggtaactcatcaaaagctaaatgagctggcaaatattcgtagctgtcaataaaccggtgtgaacagttgcccagtactctttgaacagtattaattgaaatattgttttctctggcaatgctggtcatagatcgatcttcagttaaagctgacaacactttaagcttagaggcattagaaatagaacagtatttaccaattcagactgagccatagatcagcgctcacaagtgcgacatttaactcgttgcttagctaatcttataatgaccggtaagcttgcattagctgtcggatagtgaatgttggtaatcaaatggccattatgtaagagatctagggagccgcagaaaggacaagcaggttgaagcaattcagcttcatagattttatgcttttgcagtttgatcgatttatagaaatcacctttatttataagaatttgtgtggaaacgatttttattgaagaggactatgtcctcttttttgcaataaaaaatcctgttaacagcttatcatatagataagtcatcaacaggaaaaattatagagccaatattttgagattaattgataggggttgaaaagtaaattttatttgttatagaaaatatagaaaaaggattgttcaagaaattattttacgaaacctgcagtgaaccaagtgttggcactaggcttaagtgaccagccagtgaccttcttgttaacagcagtgattgagtattggttggtagttggcacaacgtatgcttcatcatacatccacttttgccacttcttgaaggcattagcacggtaagtaggattgaaggccttctctgagtcgatatcagccaaaagcttagtttgcttaggtgaaacgaaacgagcaaagttgtatggtgcagcttcattgtaaaggtcgttaggggatggttcacttgaaagtgaccaaccaccttcgaagacgtcgattcttggatcgtcagattgaacagcttgtacccagttgttgaattccattggacggccgccgacaaatttaacatccaaaccaactttcttccattgttggatgtagtttctccaaacaggttcagcggtagttgagttgtttctaacagccaagttaattactaacttcttgccgttaggttgaactctgtattcacccttcttcttgtagccggctttatccaataattcgttagccttcttcaagttgtatgggtaacccttgattgacttgtcagtataatcaccaaattgttcagggatcaaagtgttaacgcggaaggccaagccgtggtagtaacgtttagcgactgcatcaacgttcattgcataagccattgccttacgcaatgatggattgtccatcttggagttcttgttttcaacgttcttgccagacttcttatcccatttacctaccttaaagcctaagtagttgtaggataggggaaccttaccaatgaagttggtatcagtagcgttcttaacatcatcccattgggtgttaactacgccagctatgtcgaacttgtgactcttgatggcttgagtaactgagttggtaccgatgactgtcatggataccttttccaagtttggtgtaccacgccagtaatgcgggttacgttcccaagtgacagattgaccacgaacaagcttgcttacgcggaatgggccgtagaagagtggttgttttctaaccttgtcactagacatcaacttggagaatggtacgtcctttaagtaatggtaaggttcagcgtattcccagaagtaaccgttacctgattgaagcataccaggcttcatttgtttcgaccttgcggccatcttcgccatcaggcatctcaataccagaaatcttcttgctcttgccttcgtgatattctgctaaaccaacaatgtcggcaagagaatcggtataacgttgtgacttggagtctttattagcgataatttcataagcgtattccacgtctttagcattaacttgcttgccgtctgaccacttaacacccttcttaacctcgatagttacggtcttggctttacggtcaagcttaaaggtagcagcacctttattgttaatcttgtattgatcgttgactgagaataacccttcttgtcctggctctgcaacttcactgtcagtggcagtatcagataattctggcaagaaaataccagtgaagggactatcagattcgatagcataatttaaagtgccaccttttttaacacttttcacaggaacagtttgactgaatttgtgatgtgtttcatctgcattattattttttgaatttttattattaccacaggcaaccaaacttaaagctgccccagaaacaagtgctaatgcaccaaaatatcgttttgctttactcattcaaaaagcacctccaaataaattaaaaatatttgagttttattctatgatattaaaatgaaaaaaacaatagaaagatgaataaaaatgtgaaaaatattatttttaaattatttttgaagctaagattagttttctttcttggctaattaggcatagaataaggaaataacagctttttatgttggaggaaaatatggatacagcctggcaaaaatttaaaaataatattccattacgtcgatttgtggtactgctattaattattgcctgcctttatgaaatacgagcaatgatgaacacagtattattaacttttatttttacttatgtgatcgtgcatttaattcatctagtgcagcggtattttcctaaaataccaacaggcctaattgttgcggtaacatatctaattatcttggcgctactttatttcgtggttaccatttatttgcccatgttagttggccaaatatctaaaatggtaaagtcagtgatggcgttttatgaatcaaatgaatcatcgcgcttagccagccatgtaacgcgttatatcagtaaaggtgagattgttacgcaggcaaaacgagttgggacttttgctctgcatacggtgaccaattttggtagtttaacaattgctacctttatgtccttgattttaagtttcttctatacgattgaattagatagaatgattgaattttcaaagttatttgttaaaagtggttactttaaatggctttttgaggatattcgctattttggtaaaaagtttaccaatacttttggtgtcgttttagaggcgcaattctttattgccatttgtaatacggccttgacgatgattggtctggcatttatgcatatgccgcaaattattgccttaggcttaatggtctttattttaagtttagtgccggtagctggtgtgatcatttctttgattccattaagtattatcggctattctgttggtggcattcgttatgtgatttatatcttcattatgatcatgattattcatgcaattgaggcctatgtgttgaatcccaaatttatggctagcaagaccgaattaccgatcttttatacttttttagttttgttagtagctgaacacttctggggtacttggggcctgattgtcggtgtgccgatcttcactttcttgcttgatgtcttagggattaaatcggcgaagaaaagtaaaaagaaagcgagtaaataattgagagtacttttgacaggtgatagcattattgcacgccaggaaggaaaaaatgaaccgcaccttaattggaatttacaacagcttttgcctgagattgaactagaaaatacggctgtttcgggaattaattctggggcattttttgccaaattaaatgaattagtactaagcgtaaagcagtgcgataatttggtgatcttgctgggaaccaatgatttggctatgcacaaacaagtgccagcgaggcaatttaagcaaaatatggaaattatttcctcggcaataatttgtcaatattacccaccacatgttctgcttgtttcgccgccagctgttgatgaagctaagcaacgtgtacggaataatacgttagtagcggaatatgctcagatcgtgaaagaagtagcacatgagtatcattttcgttatgcagatctggcacaagctatgcgggatattggcgatttaagcgagatttgtcaaggagtaaaaaacgatggacttcattttggtgatcgtggctatgagattttaggaaaactaatcgctgaaaatttgaaacaaatgtaaaaaggaccgcaaattgcggtcctttatttttcgctattttaatgttgcccaaagcaagcttccagctagcgcaatggccaagaacggaatgagcaaataggcaaaaaagaaaaacataattcctacgactagtaaaaagccgataattttaatgaggccaattcctaatttaaaaaatagccagagtaagagtaatgttaataataaagaaagcatattaatacctccataaatctatgagagtattttactaccaaattggacgaatagaatagtaggaagattaatgctttagaaaaatttagttaccggtaacaagataaatcatattgaaagctctttctgtaaccgctatgttttaactattgaaagcgatttaagaaacgagaggaaaaataaatggaggagaaaaaaactgggttacctacgctagctagtacgacaatttggatgattagtttggggtatttgggtgtgcaaatcgcctttactttggaaacatcacagatgagtcgaatcttccaaacattgggtgctgatccgacaaaattaggctggttctttattttaccgccgttagctggattggtagtgcaacctggaattggatcattatccgatcgaacttggattcctaagattggacggcgtttgccatatttattagtcggtatgatctttgccgtaattactatgattttgttaccaaatgttggtagttttggtctaggctatggttcaattgaggctctaatatttggtgctgttgcaatcgcgatattagacgtggcatcgaacatggcgatgcagccatttaagatgatgatcggtgatatggttaatgatgaacaaaagtcatacgcttacgggattcaaagcatgttgtccaactttggtgcggtaattgcggcctttttcccattcttattaactagtttgggtgtagccaatactgctaaaaaaggtgtggtaccacaatcagtagttatttcattctacgttggtgctgctgttttagtaattacttcactctttactatttttagagtacatgaatatgatccagaaacatatgcgcgctaccacgggattaaagaatctgataacaaagaaggtggcggctggattgaattgttaaagaaggcgccaaaggtcttctggcaagtatccttagtgcagttcttctgctggatttcattccagtatttatcaacttacgccactggtgcgattgcgcaaaatgtttggcacaccaccaacgcttcttctgctggctaccagattgccggtaactggtttggtgttttgactgcagtgcaatcaattgcggcggtaatttggtcctatgttttggctaaggtgccaaacaatcaccataaattgggttatggccttagtttattcttaggcggggtaggttatacttcaatcttcttgattcattcacaaagtcttttgattttagcatttatcttgattggtatcagctgggccggaatgaatacctacccattaaccatggtatctaacgccttatcaggtaagcacatgggaacttacttaggtttattcaattgttcaatttgtttacctcaaattgtggcatcactgctcagtttcttaattttcccaatggtcggcaattccatgccagccatgatgttaatcactggtatttcaggcttcttgggagctttatcagtcttagcaattaaggaaacctacgtaaaatagaatatcttctcattaaaaaacacactacaatgtgcaattatgcatgtagtgtgttttgtgatttatctatgtagaaaaattcgccttcgtctttgaacattttgtaggtttctttgatcattctttcagggattgcataagattggacgaatgcaattgggtcatagaaattatcttcttgtccgcaagagtattgatagatcagatgcaatccataaatatcggcatctctttcttcgtcatcaaggccgccataatcaagacaacaattatattgttttaagttgggcctgcaatccatgatatgcccaatttcatgagcaactgtaaatggtacttccggtgaatggtggtgccaattcatgttgatacagatttctcgctcatttttaaatgaaagagagggattattgggatctgattcaaaaaagacgtaaccaatatcatgctcataagcataattaaataaatacgtgattagttgattttttctatagttattgtccactgccatgttttctagcttctctctctttgatgtctctcttcatgagttctcggaccatgtcaagatattctttaggaacaggatgaccatagtatgaatagggcacctcgtcttccaaattcacagtgtcctgcaaacgtggagcagggtcatcggtaatgccacttaaatagtctattgatgtatgcaaaaccttagcaactgcacctaaggccataataccaggttttctggttttccaattgtagatacttcttttgcctagtccagctttgtcatttacttctagtaaagacatttttctttttttcgctaattcttttgtacgctcaaactcaatcatgacgaggttttcttcactttctaaataaaaaagtatgctaaaaagcatgttttaacttgacatagtattcgtataagcatattatatgaactgtcaacaagttaaaaacaatctaatgaccagaaaaattctatgtggtagtggaatcaacggcactagtctgttttttatacccttattgtagtatattgacgtattttggtcaatgactaatatgtcaatacttaaattaggcctgcttgttgaacattatcaaacagaggtgaagtccaatggacattcgttaaccccctctgatcatttgatcaaaagagaggtgatttatttaatcatggatattcatgattacgtcgagctgattactttggctttatgggtaattagcgtagtaggtattggcatcttgagcagggttcattttaagaacaagcgcttagagcaattccgcaatactgcagacaacttgatgaaaagctatgtacgcttatacgacaaggaaaatctttctgacgaacagaagattaatcgcgttggcaatgcagtagtgaacagtcttgaggcaaaaggcttcaagctgaacaagcaagaagtgcaggatatctttgcggaagtagctaagcaaatggatgagcagactcaggataagtagtaataatttttaatttttcggaggttttgttatgtacgaaacatcaaatatttcaaataatggtgagttttcattaagtattggtcatcattcagttgtccaaaaaggagatgtaggtcaaaactatatttacgctttgcagttacgtgataatcaaaagagtacttacgtcttacgtagaagtaaaaatggtggtaattttaacactattttagatttacacggttcagcagctggtcatacgcagacttggtcctatgcaggtcctaataattggtttattggaactaagccgagtggaagctgggctattcaaattgctcgtgtaaatattaagactaatggtggtcgtcatactacacactatgattttccacgtttagctcacttagatcgtgccggtaatgtaccatatactggtagtttagtacgagcagaggcagcggtttctccagatcacactaagttcttattggttacagttgataacaatggtaagggatattttactatttataatctggctgctattaatgatgcacttgatagcgtgcaatataatagtggtgcacagcgttattatgatattggtaaaatttcagaatctgatgttgtaaataagtttactattgatagattgtattcaggtgacgttaatgataagagctatattttacattcgcttcaaggctttgatgtagataacaatttaaatgtatttatttcaagtcaaaaagctccaattattgattcagcaacaggtagattcccagcaggaaatacatttcataaagaaattttggttattcccgctaatgctagagatgatcaaaatcaatggactaatgtaaatctaagcgcttctggggtaattgataaaccaggaactggtcgacacactgaagttgaaggtattcaagcaatcgatgctaataatgcatatttaactgttgcatatcatattaaaaaatatgattctttagctggtgaatataagtcatacactgattacagtacaatttataaattgtcatggtattaattaagcgcataaagttggataaaaaatcctaaaaagaagatcgaatgttactgcaagatgtaatattcgattttttgtgttttcaaattaatttatgtaaacttataaaactctaattaacgtaagggggtataattgcagtgtgagaattaaaaaggatgattatgatgaagaaaaataaaattgcattaatttctgcagctgcattgatagccgttacacctttaacggtttggactactcaacctaatgaagtacaggccgcaggcacttcaattagaaagactattatgcatactgcaattggttatgatacaaatggtaggaactcgggcataaaactttatccatataaagttattaacgttgaccagattcctgtccgtattaatgaccaacaatattacaaagtaactggtaaatacttatatataaagcctacaaatatcgatggcgtaacacgaaaaattactcataacacttatatttatagtagctctactaaacgcactttttttaacggaagacgaaaattaaataaaggtgaaactattactacatatggtagttcttacaaatttaaagatggaaaaagttactttagaataggcggcccaagcaagcaatatgttaaagcagctaacttaagttcagtaattaaaagcaatactgcttcaggatcaactgatgtaaataggcactatgccaaagaaactatagtaacagttcatgttagaagcacatataagaagacagcaccaatatttacttttgatgaaaatactactgctgagaataaggctgtgattgtaaaaagagttccaaatggtactaagtttacagttgatcggctagaatatggcaaaagagctgacatggtagcagccaaaatagcatcattcaatggaaatcaggctatttatcatattaaaggtactaataattggatttattcaattgatgttgatcctgagaaacagttgttagagcaatattacaacaaataaattttaatttcagttaaaatgtcaaattaagcaaaaagagaatcctgttccgttgagcagggttctctttttggatattcattagtaaattgtttattttttgatctagaagaattagtcttttacaacatccttaatgttcaaccattggctcttgttgatcttaacgatcttcttgccatcagcctttttgacatctttggcagtgtaggttgaacccatagaaactttttgagtagttttgtgaccttgagcattcaaaacgttaactttttgatttttggtgtctttaacagtaacaaaaatcttgtcacccttcttgattgaaggatcggttggcataacttgtgcagttccaagcttaggagcttcaaaactagcagcttgactaactgaagcaccaacgctcattaaacccattgaagcaacgacaactgaaacaaccttaatcattttctttgataacataatgaatacctcttatcacttatctactggaacttttcgttcctcattccgtacaattcttattatataacgcaaggggaaaagtacattttttaggaaaatatttttactgggtaaatgttactagaataacgttttacggaatttcgtaaaaagggcagaaaaaaacagctattcattttgaataactgcggagatttttggtataagtcccttaacgatgacctcggctcttattataataagaaaatccgcaaattcacagtgttcatattatagctgtcgttcactcttaacttataatcctaaaataacgttctaatctgtgaagtattgcagaatatcctcctcagttaggcgttttttgtcgtcgcctttgacatcaaaaacgattctaccattgtttaaaatgatagtgcggtttccgtatttgattgcgtcttttaattggtgagtgatcatgacacaggttaaatgctcttcttgcacaactttatcagttagttcaagcaattcgcggctagtatttggatctaacgccgcagtatgctcatctagtaagagtaaatcagggcgcttaattgtcgccattaaaaaacttaatgtttgtcgctgaccaccagaaagattacccacaaaagtatttaagcgttcatttaacccattagggagttgggccgcctggcgtttaaattcttgcatatgtttatctaggcctcttaaacgcagaccgcggtgttcacctcgtttggttgcaagtaataggttttctgcaacagtcattcgcggagctgtacccattttaggatcttggaatacttgggcaatatatttagcgcgttttacttcagaaagattggttaaatcttggtctttgagcagaatttttccgctagtaggaaaaatagagccattgataatatttagtagcgttgatttaccagcaccgttggttcctaaaagagtaacaaaatctccatcttcaagttttaaattgatgtttttgaggatttgcttttcctcattggtaccagcattaacagtagtagtaatattttgtaaatcaagaatagtactcatggtttttcaacgcctttctttaataacttacgagtgcggaatttttgttcaaataatggaagcatcatgcaaatagcaagaataatagcggaaatcaatttaaagtcgttggtactaaagccaagttggaggactaggagtaagataaggcgataaataatactgccgataacaactgctaccaagcgggcggttaaacttaaattaccataaacgacttcaccaataatgatggcagctagtccgataaccatagtaccaatacccatattaacgtcagcgtaaccaccgttttgggctaataatccaccagctaagccgatcaagccattagaaagcattagacctaagattttcatattatcggtattgatcccaagagattgggccattttttcgttgtcaccagtggcaataaaggcttgaccaagatcagtatcaaggaaaactgctagcaaaacgatgacgataatggcaatgatcaaaccaacaacaatagtaggaaaattgatcggtaatttttgtaaaagctgaccgtttagtaaagtatttttgttaagtaaaccaacattagccttgcctagaattctaagattaactgagtagacgccagtcatcgttaaaataccagctaaaagaacaggaatttttcctttagtatatagtaagccggttactaagccagtgaccatgccagcgaagaaggaaagaatggtagctgctaaaggattgacgccatgaactaaagcactaacacaaattgcggcaccgaaggggaaggttccttcaacagtcatgtctgggaaatttaaaattctaaaagttaggtagaggcctaaggctaaaataccccagagtaagccttggccaatagaagaagtaattaagctcatttgataattcgtcctttcttttgggcagcttgaattacactgttaggaatagtgatgtttaattcatgtgctgctttttcattgattactgtttcataatgggttacgcgtctgactggaagagcagcagggtttttaccatgtaaaatttgtcctgccatttgtccagttaagattcccatgtcgaattgactgacacacctggtagcgagaccaccacttttaaccatagtatcggcagcaggaaaaactgggatcttggcactgttagtagcctttaataaggtggcaattccactagctacagtattgtcggttgggacataaactgcttgaaccttgcctaccatggtttgggcaacttgttcgatatcattggttgaagtgatagtgtaagggataactttaagtcctgttgcttcagctagtcgtctgaattcacggtactctgatgctgatgaatcatcacttgaggtgtaaatgacaccgatgtttttggctttaggtagaatttcttgcattaaggccagctggctggcgattggctggcggtcctggacaccggtaattttaccgccgggatgcgctaggctttttactaaatgggccccaagaggatcgctgaccgcgcccataactacagggatgttgccagaagtattagctagagattggacagcaggagtggcaattccaatagttacagtcgcattttcctggctaaaacgatcgctcattgatttcagattactttgatcaccttgggcattttgaaaatcaattttaagattttttcctttgacatagccttcatctttgagaccctgaataattcctcgatgaatctgatctagagcggggtggctcattgtttgcaagataccgacagttggcgttttcttttccgcatttttcttatttacttcactgacaaatgcaactgccagaaaagcaaaaagagcaataattgttccgattaaccttttcattctttttctccttcaaacaaaaaaggcacttccttttttcgggaaatgcctaaaacaaaacccgcacgttattttccgtgcgagcaatatttcttgaagattttaccagcacagatacgatcttaatgagtcgcatctgtacttcacgaacagaaacaactctagtgctggaattgccaacgattgattgctgtaaatttaatcatgataaaatcttcctttcgttcaaatttgttagctaaattttaagtaattatgagaaagatgtcaaatgattttttgttagatttatttagttttgaataatttttaaaatgctataataattattccggcaaccatcataaaaagaagggaggaattctcttgcgctatcaacaaataatttttgatgtagatgacacaattatcgattttgcggcaactgaagattttgctttacatagcttgtttaacgctcatcactggcctttatctgcggaattgcagcggcagtatcattcttataatcaaggactttggcgccaacttgaacaaggtgaactaacttatgaagagttaagtgaaatgacttttcatgattttattttggatcattttggcattgagattgatggcaagaaggcaatggatgaatatcgttcatactttggtgaagcacaccaattattgcctggggttgaagatacgttgaaatttgctaaaaagcagggctataagctgaccgttttgagcaatggtgaaaaatttatgcaaaatcaccggttggagcttgctggggtgaaaaaatattttgacttaattgttacgtcagaggaagcccattattctaagcctaatcttcatgcctttgactatttcttcagtcgaactgagatcggtcctagtgagacagtcttttttggggacggcctacaatctgatattttaggtgcagaaaaatatggctttgatagtatttggtacaatcatcgccatcgtaaaaataccttgcatttgcatcctaagtttgtagtagaaacttatccagaattggttaaattaatgcagaatgattttgagaagaagtactaatcattatactttttgctcttcaagaagatgccccaaccaatagttaataagctgacaaaaattattaaaatccaaaagccgttttcattttctttacctggtaagccgccgacattcatgccccaaatgccactgattaaagcgggaagagcaattaccagggcagctgaatctagatatttcattaaatgatttaggtgactgtccatcatggcggtaaagaggccgctaatggaattgagcaagtcagtgtaaacgtgaatcattttggtaattcgtttttgcttggtcatgatacttttgacgcgggcttgatttgctagcttgttttctactaaataattaccaaattcttctagactaggtgtttgatcatctaaggtatgctttaagtaaactagctggcgagttaaatctgttacttttttaattctttggtcttagttgttcttcttgcagcttgatctaaatggtcaattttttgtttaattgttactaattctgcatgaagatgcttgatttggatacacaggctttgaaaaattgtttcaataatattttcttgcggttttaattctgaaagacttcttgttgtgccaataaagagatgattttggtcaaaaattgtaaaaattggaattagctcttgttcaattggcaagtcattacttaatagatcgaaactcactaataagtgaccattttttagtttattagaatcaatagggataaaacgagcaacctcaatcgaggaattagggtaagtgaaaattgtaggatctagatcccattttttgattaaatgatcgatatcgttttgcgtcaattgatcttttaaaattatattctgactattagtaagcatatttgttcacctctgtttcttttttagtttaagattaacatgtaatgttttttagactgaattaagttgacttgaaaatatgttttttttaaaaatatagaaaggtgagaatatggaattacattcacttactgatacttatactttgaacaacggcgtaaaaattcctgtaattggtttcggtacttggcaaacaccaagtggagaagttgcaagagaatctgttgaagccgcacttgaggcgggataccgtcacatagatactgctgcagcttacggcaatgaagaaagtgttggcgaagcaattaaacgtagtggcgttaaccgccatgaattatttgtaactactaaattgtggaattccgatcatggttatgacaagactaaaaaggcaattgatactagtctagaaaaattagatttagactatcttgatctttacttaatccattggcctaatcctgtagctatgcgtgacaactgggcagagcttaacgctgaaagttggcaggcgatggaagaagcagtgaaggctggcaagattcgcgcaattggtgtatccaactttagaaagcatcacctggatgaattaatgaagactgctgaaattaagccggtagttaaccaaagttacttgaatccgagtgatttgcaaccggaagtaacggccgcaagcaagggatatgatttgcttaatgaggcttacagtcctttgggtacaggtggtttattaggcaatgaggtagttaatgcagttgctgaaaactatggtaaatcaccagctcaaatcttgattcgctggtccttacaacatggctttttgccattgccgaagtcagttcatcctaagtatattgcggctaatggtgatgtctttgactttgagattagtccagaagacatgaagaagttagatggtttacgtggtgcaagtaagttggctaatgatccggatgaggttaacttttaatttaatttggaataaagaaaattgaattatcacaagaagtatcttatttttgaagtaagatacttttttattaggtgagacaatgaagaaaattacaacaggaattgtagctcacgttgacgcgggcaaaacgactctttctgaggctctgctgtacaaggcaggaaatttgcggacgctaggaagagtagacaatggggatgcttttttagatacagatcaattggagaaaaaacgtggcattaccattttttctcatgaagctaaattaacgactgatgatttagaaattacgttgttggacacaccgggacacgttgatttcagtgcacaaacagaagaaacgctgagtgtacttgattatgctatcttggttatttcaattacagatggtgtaactagttatactcgcactttgtggcatttgctcaagcgatatcaggtaccagtttttatttttgtgaataaggttgatgcgataggcgctgatcgagggatggcgttggttgatattcaaaagaacttaagtgagagttgcgttgatttttcgaagattgatgatgaattttatgaaaatgtggctgccacagatgatgccttgcttgagaagtatttggatagtggtgccatttatgatcaggacgtgcagaatgcaattgtgcagcggaaagtttttccaatttattttggttctgcgttgaaattaacgggaattacggaatttttagctggttttagtaaatggactaaggaaaaggaattctctgataagtttgtggcacggtgctttaagatttcgcatgatactaaaggtgaacgcttaacttggttgcgaattttgggtggtagcttaaaggcaaagactgagctagctggtgagaaaattaatcagctgcgtagttataatggtgaaaaatttgtaactattactgaagcagctgctggagagatcgttgctgcaacaggattgactaagacgtatccaggacaaggattcggcgtgggggatgcaccaactgcactgcttaagccagttttgacctataaagttaatccccaggataatgatcttcacgcttgcttaaaagctctgcaaaccttggaagatgaagatccacagctgcatgtgacttggtccgaacatttgcaagaaatccacgtgcaagtgatgggaaagattcaattagaaattttagaacagttaatgaaagaacgttttggtttgaatattgtttttgaacagggaagtattctttatcaagaaacaatcactaaaccaattgaagcagtaggccactttgaaccgctacgtcactacgcggaagttcatcttttactggagccactgccacgtaatagcggtattgtttttgaaaataaatgcagtttagaagttttgactaaaaattggcaacatcaaatcatgacggcattgaagtctaaagaacatcttggtgttttgacagcttcgccgattacagatatgaagattaccttgatcggtggtaaaggctcaattgtacattcggttggtggcgatttccgtgaagcaacttatcgtgcagtgcggcaaggtttaatggaaaaaaagatacgccaacaaactattttgctcgaaccgtggtatgatttccgcttagaaataggaaaagatcaggtagggcgtgctttaaatgatattcagcgcatgaatggaaaatttagtacgcctgaaaatattggtgaacgaacagtcatatccggttctgcaccggtagctgaaatgcaagattatgcgacagaagtgcgcaattatacgcatggtgaaggtaatcttgaatgcgtagtcagtggttatttgccttgtcacaatgcggcagaaattattgaggaaaagaattatgatcccgtttctgatctggagaatacgcctaactctgtcttttgttcacatggtgcaggtcacaccgtcacttgggataaggtgccagagactgcacaatatccttatacttatccattagattagcatgataccatgaattgtttatcttgttacatgtgaaacattaaaaatgcggcatagtgcttttcttattaaaaagtgcaacttgaaataagcgaaatatttgactagttatgaaagaaatttcattttattagcaaaatactgctagaaaatcgcttgcatagtaagataaaggtacgatagaaaggtgataaaacatgacacaaataccttttaaagctgtagcggttgatctagatggcacttttttgaccgaaaaaaagacttttgatcatgcgctatttgcaaaagttttacgaaaattgcaagctaatcaaataccgtttatctgtgcaacagggaaccaactaattcgttcgcatgaatattttgacgagtttactaatgaagtagattatgtgtctgaaaatggggcaattctagaagccgatggcaaagtatttaagcggattgcgattgactatgatactgcacaaaaattgttacattttattcaaacagaataccctgaagcaatcattatggttagcgcacagcatcattgctatattttgacgagtatggatcaagcggataaagacgacattagaatttattatcgtgatgttcaggaaatcgatcagtttactgacattgatccagccgatgcgatcttgaaggtttgtctgacagctgatgatgaactggcgcaggtgattcaggatcggtttaatgaaaaatatggtgactgtattcgcggcactagcagtggtaatatgacaatcgacttggtgcataaaggcattaataaggccaagggcgtagacgatatgcttaagcattatggcattgcgcaaaaagatttgattgcctttggcgatggcgaaaatgatattgatatgcttaaggcatgtggctatagttatgcgatgaaaaacgccaatgcgaaggctaaggcggtagcaaagtatgaagcgccaacgaatgatgaaaatggtgttttgaaagttttggctaagtatttagatattgattaatttaatacgcaaaaaagacttgagaagtaattttcccaagtcttttagtttgctttattaactgctctgaaaatattaagtccgctaattagaatgatgaatccacaagctaaaatcagaaccgtttcaccagagctgtctaacaaaattccggcaacaattgaactaatcggtccaccaatagaggtactggtacgaatagtagttagcactctgcctaatatttcatcgtccgcagtaatctgaatcaatgattctgccaaaatattgtgaatactcgtcattagcccaaataagaaaattagtcctgtgaatatcaaccaattgttactgaagaaaattatcaaaagtaatggtactgcactagctatccaagtaaaaccaattgtttttacccgtacggataatcttcctgcaatagttgcacctattacaaagccaatcataaaactgatatagaacatactgtatagtcccgcttgaccattttgttgagcaattcttggcaacagaatggccattgctggcgtcacaaaagaatacaggattgaggaccagaagtaatgacttaagaaataatttgttttaataaacttatagccattaagaatttgattgaggtattttgcctctgcttttttgactttaggtctatctttaatttcttttagggcgtaaaacagaaaaacaaaactgattaggctcagtagactgcagatcaacattacattagctgaaattaaaaaagttaataaaaatccagaaagagcagttcccgctacattcacaaactggtcgatgttgctaactttagaaattagattatttaattcttggtcatcagccgttgtttcttttaaaatagcccggtcagctggattaaaaaattcatcgcagacagatactattcctgcgcagattaatgccaaaatataacttttgctaagttggtaaactgcaattgttgtggcaaataggaaaacagtttgaacaagaattgaatagtaacttgtccttttgaatgaataatgatcgataatggggccgtagaatattgataaggcggcagtggtggaaaagatggcttccgcaattccgacgacaaaggaacttttggtggaagtttgcagccaccagataaagaccatgctgaagagggaattagctagtccgccaacggcacgcgagaaaaaatatgatttcttttttaacatttgaagggttcaccttactatcatttggtcaaaggtatcgtatccacaccatgaatatggatggtttctaataattttatctatttttttaaatacatatttagactcattaacaatgcttgctctgttttgaatttttgacggataaattggatcttcgaaagtgatcttgattttgtatttttctgtcatttcagtatgtaagataataattggaacttgcattttattgcttacccaagagctacctaatggcattgaaacacgtgctcctaataaatttacagtatgttgtggccctagtcccattgaaatttctggtggaattgctactactttgccttgtctgatgtcttttaacgcttttcttaatattaatgggtatggaacaccataactatcaacaagagactgtaaaatagtttgtgtaaggatgaatgattccttaaatttatttctttaaacattagaaaaaggagttcctttctcgtatgattggtttgaacaaaaaaacacatacagaaagaagaactccttcatgaatgattttaccaaagattttgctcaagctctattcaatccagacaaaataaatgatttattgcgcaaagagctacaacaggctgttaataacttgttagaagctgaattgactgcctttctgggctatgatccctatgccagaaatggctggaatactggcaactctagaaatggtgcttatttccgcaaagttgatacgcaatttggcccaattgaagtgcaagtgccccgggatcgcaacggtcaatttcatcagcacacgctgcctgactacaagcagcactcggatatcttggaaagcatgattatcaagctttactccaagggcgtgaccaccagggaaatagccgatctaattgaaaagatgtatggcagccattacagtccagctcaggtatcaaatatttccaagcagatgattccaaaggttgaggcttaccacaaacgcaagctaagcgacaagtttttctgcgtctatttggatgcgacataccttcctttgcgccgagaaacatttgagcgtgaagcagtctatattgccattggcatcaagcctaatgggcacaaggaggtcattgactactgcattgcgcctagcgagaacattgaagtctggacagatatgcttcaaaacatgaaatcccgaggcttaaagcaagttgagctttttctttctgatggtgttgttggcatgaaaacagccttggccaggacttatcctaaagctcattttcaacgctgtttggttcatgtcatgcgcaatatctgcgctaaagtacgcgtcgacgatcgtgaaaagatcatgaacgaattcaaacaggtgcatcaacagacaaacaaagaagaagccacagctgtcctgcatgacttctataccaaatggggcaaggtttacagccatgttatcagaagcttgaaagacatagaaccagatctgctggtcttttataactatcccaagcagatcagagcttcaatttattcgactaacatgattgaatcatttaacaatgtgatcaagcgcaaagctaagcctaaggcagagtttccaactgaacagtcgcttgatgcttttattggcattcaggcaatgagctacaatgaccgttatttcaatcgaattcataaaggctttggtcaggttcaggacaccttagaatcctactttgattaaataaataattaaaaaatcaatttacgagaaagaactatttacacaaaagatttgacagtttcgtagaaaatgaagccaaacttcttattatgcttgactttacgtagaaaaagacctaaaagtgtctaacttttaggtctcagttcagtgtcaaaaatgacacctttttttattttgaattaaagtttatcagcaattatatccattccattttctctgagaaaatttgatattgttttggctttctcaagtttattattgagaatagattcatagtaattagccattattttagcaaaacaatttttaggatcaattgttaaagaattcagtattttaactgaagcatctatattagtatttataatacgttgcttttttttatgaaataacttaaataattaactaagattgcggatattattttttgcttttcttcaggaagtgaatttatattatgggtgttctttataatattttttacaacagaatttatttcatttggatcaaaaatggacattgaaatagcaaatagtcttaagctattttccgtccaattatctgtttcgaatatagttttctttatgtattgtttttcatcattagaaatctgggctaaagtatttgaaattgctgcttttataataataatttgtgccctaatattatccaaatttagttcactattgtttctatcgtttagcattttttctaattctgttattttcgacaaatctttttgatagtaagctgtgtgtaataaattatcacaatcaattttagatatgtgatttttattagtattattttcaacctttttaaaaaaagaagagtaatcaatattatgcaaacttaaaatttgtaataaatcatttgctctaatactacaaatatcgcgttccactttagagtaaaatgatttagtgagtatgttgccagccattttactttgacttagatttaattgttttctttctaacttcaatgcctcgccaattttcattttctttcctccaatgtcggataatgactaaatcatcatttgctttctgatataaataaatttatgcaattgaaattttatgtcctgaaaagtatagggtaaattattcaagaataagatactaaatatttagtatcttattttgcatacaattaggctgaaaaaacacaaaatactaatgttataattgattttagaacttaacaagaaattagggaacttttatgaaccaattatatcaagaaattaatgatgctttatatcatgtatattacgggattcagcggattgaagaagaagaactaaagaaaagtcgtttcaatgatcttactcctaaggaattgcatgcagtagatgctattactatgtatgaacatcctactacttcgcaagtagcagaaaaattgcatttgtcacgagctacaatgactgtgactgtcgatcggctagttagaaaaggctatgttgaacgaatccgaggtaagcaagatcgtcgtattgttcatttaaaattgacaatgcgaggcagagtagtgtgccgagcatatcatgcttatcataatcgaatggttaaaagttttttgcaaaatctagatgagaatgaattgcaaacaatttatcatgcatttaaaaatctggatgagtttttgaactcacactaatattattttgaaattgcttaagcagactggagatattcagtctgtttttttgtggacgaaaaaaatttaattacatagaagtgttcttagtattagtgtaaatagaatttttgagttctatatgaacttgtaatgtgttgacaataaaaaaagagatgataagatttgaatatcgaatagttagatatactaattttaaaaaacgaacatggagatgaagttatgccaatgaatactgctgagattcaaagcaagttagattgtcaagctcccttgatgctgttagatcgagttacaactttgaataaagatcaacaagtaattgctcaaaagagtgtgagtgctaatgaatcttattttcaagggcactttcctgagaatccaataatgccaggtgtgctgctaattgaagccatggtggaggcaacacaatttatgtgggatcggtcagatttgattcttactagagttaaaagaggccgctttcgtgagatggtcaagccagggatgcagttgacaattaaggttaacgccattaaaaaatacgcatgtcaggcaaaggttttaattgatgataaagatgtttgtgtagcagacttggaatttaaggtaacagaagaaaattgaaagatgtaaaaattatagcaactggttttgctgtgcctgagcatgtcgttactaatgatgatctcagtaagatcttggatacttcagatgaatggattgttaaacgaacaggcattaaaaggcggcatattagtcaaaatgaaaatacttcggacttggcaactcgtgtagcaaaaacattattgagtcagagtaatgtaagaactcaagatattgatctgatagttgttgcgactatgacacctgataatatgacaccagctacggcagcgattgtccaaggcagaatcgctgccgaaaaggcggtatgttttgacatttcagcggcttgttcaggcttttcttatgctattagccttgctagaagcatgatgcttaccaataattggcgtcacgcaattgtaattggcgcggaggttttatctaaattgctagattggactgatcgctcaacggcagttttgtttggtgatggagctggtggcgttttattaagtcaaagtaatgccactcatttattgggacaaagtttaaaaacttatggtaataaaggtgatcaattaattgcaggtcatttagatgtttcttatgacattttgaaaaataaaaaaagctatcagcctttaccatgaatggacaagagatatatcgttttgctacgcatgaagtaccacggtcaattttgaaagcttgttcaaatgcacaaattgaacttgatcaaataaattattttcttttgcatcaagctaatagtcgaatcattactcaagttgctaaaaagttaaatcagcctttaagcaaatttggtgtaaatattgacgagtatggaaatacagcggctgctagtgaagcaattctgctggctgaaataattcagaaaaacagaattaagccaggcgaaatcattgctttaagtggctttggtggtggcttaacaacggctacattgattattaagtattaatacgaggagaataaaaaatgactaaaaaagaaattttaaaagatgtacaagaaattgcccaagatgaattagatgttgaaccggaaaaaatcacaatgactaccaacatcaaagaggatttagacgccgatagtctagacctttttgaaattttgaatgagttagaagataaatacgatcttgatttagatgctgatgagagcatccaaacaattggccaattagttgattttgtacaagcagaaatggataagcaaaaataatgagttacggtattctgtttagcggccaaggcgcgcaaaaagcgggaatgggacttgattttttagacgatgatctatttaaagaaacgattgaaaaagcaagtttagctagtcaggaagatttggttgccattcttagagatgaaaatggagaactagataaaacaattaatgttcaacctgctctagtagcctttgaaataggaatttttcgtatgcttaaaagagactgtccccatctaaatattagtagaatggttggtctgtctttaggcgaatatagcgcaatgtatgccagtggtagtctagatttagaaaataccctgagcttagtcagtgatcgggctcgttatatgcaagaagatgctgatcagattgaaaacggaatggcggctattttaaaacctaaactcaatgatattgaagttttaattcaaggcctgcaaaagcaaaacaaacgagtttatattgctaactacaattcgcctaaacaagtagttattgcaggtgaaaaatgtagcgttgcattagcttctaagcaaattaaagatcaagatttggctaagcgaattattatgctaaaagttaacggcgcctttcatacaccactatttaataatgcaaaaactaaaatgacgaagcgattagcaaatataaagtttcaagaaagtaaaactccggttatatctaatacaactgctctgccttttagtggaaattggcgtgagattatggctaagcaattaacagtccctacgcattttggctcatgtattcaatatttagttgaacatgagcaaattgatcaaactttagagattggtccaggcaaggtgttatcttcatttgctagacaagtagatcgtcacttaaagtgtagccatattggcaattatgcagaatatcagacttttgtagaggaagaacatggaattaaaggataaagttgtttttattacaggctcaactcaagggatcggcgcagcaatggcagttgcatttgccaggcaaggcgccaagcttattgtgaatgggcgaaaacaagagttgcctaaagatttaaaggatgcattggataaagagaatgctgattatcggtatttatcagcagatttagcacaggacaatttagaggagataggcaaaacagcctggaatttatttggtaagatagatgtcttgataaataatgcaggtcaagcaaaagataaaatgttcattggtatgcatgatgctgatttcgaagaggtattaaatttagatttgaaagtaccttttttcttgagtaaagcaattatgaaaaggatgaataaagagcgttccggggtcatcatcaatttatctagtgtagttggcttacatggcaatgtgggtcaagcaaattatgcagctgctaaggctggtctaattggttttacaaaatcaattgcacgtgagggagcgttaagaaatattcgagttaatgcgattgcaccaggaatgatagatactgaaatgacacaaaaattgtctgaacgtgttaagaaaaatattttggaacagatacctttaaaacgtttaggttcaactaatgaagttgctcaaggagcggttttcttagtgcaaaatgattatgtgacaggacagacaattgtaattgatggtggaatgaccatttaaagaggcaatatgcaaagagtagtaattacaggaatgggggccattgcccctaatggtaatggtgttgaaaattttgttcagaatactttagcaggcaaagttggcataaaaccaattacgaagtttgatgcatctgaaacaggaattagtgtagccggcgaaattgatgattatgacgaaaatgattatgttggcaaaagagaagcaagaagactagatttgtattctcaatatgctattcaagttgctaatgaagcgatggaaatggcagggattgatgaaaaaaatactgccccggaagatttaggcgtgatttttggatccggaattggtggattgactactattcaagagcaagtaattcgcatgcatgataagggacctaaaagagtatcaccactatttattccgatggtaattgctaatatggcagctggaaatatctctatccgttttaatgctaagaatatttcaacttcaattgtgactgcttgtgcttcaggaactaattcaattggtgaagcttatcgtcgaattaaagaaggtgatgcacaggtaataattactggtggatcagaggctactattaatgaaacagcaattgctggtttcgcagccttaacagctttatctactagtacggatcctgatcgagcatcactaccatttgatcaaaaccggaatggttttgtgatgggggaaggagctggagcactagttattgaaagtttagaacatgctcaaaatcacggtgccaaaattttaggcgaaattgttggctatggcacgactagtgatgcctatcatattacttctcctgatcctaaaggagttgaagcagctcgttcaatgaatcaagcaattgtacaggcaaatattgatcctagtcaagttggatatgttaatgcacatggtacagctacacatgctaatgatgctggagaaagcaaagcgattaaccaagtttttggaaaagatagttcagttttagttagttcaactaaaggaatgacaggtcatttattaggagctgcaggtgccattgaagctgtaattactgttgccagcttagaaaaaggaatcttaccaccaaatgttggttgttttaagcaagatccagaatgtgaagttaatctagttaataaagataatcaacagcaagatattgagtacgcaatttctaattcttttgggttcggtggacataatgccgttttagcttttaagaaatggagcgagaattaatggacttagaaaaaatacaagctttaatgaatcaatttgaagattcagatttacgtgaattgaaaattgatgatggtgatttccatttctatttaagtaaaaacaagaataaagttactcagacagtacagccgactgttcaaaagaccgctaaaaaagtggaagaaacagctcaacctgttgttcaagagaatattgacaccaaggttaaaccggttaaagcacctatcgttggagttgtttatttgcaggctaaacctggacaaccagcctttattaatgtgggcgatcatgttaagaaaggcgacacaatttgcgtgattgaggcgatgaaaatgatgacggaagttaaaagcactttaaccgggactgttagtgagataaaagttgaaaatgaagacctggtcgaagtagggcaacctttaattactgttaaggaagattaatttatgagtaaagaactagggattgacgaaattaaacaaattattcctcatcgttttcctatgctgttaatagatcgcgtcttgtttctaaaagttggtcaggaagctaaagcagttcataatgttagttttggtgaaagctttgttcaagcaagttcctctaaagatccagtttttccttctattttaattgttgaagccatggctcaaacaggtgcagttgcattattgagcaaggcagattttgccggcaaaaccgcgtattttggtggaattaaggaagcaaatttcattgttcaagcaaggccaggggatcagatagttttgacaacaaagttaactaaaatcagaaaaaatattggcattggcataggtgaagcgtgggtaggcaataagaaaattgcacaagcagaactaacgtttatgattggttaggtaaaatgaatgtttaaaaaagttttaatagcaaatcgtggtgaaattgctgtccgtattattcgttctttgaaggaaatggggattaaaacggttgccatttattcaactgcagatcgagaaagcttacatgttcaattagctgatgaagctgtttgcgttggtggcccgcaacctactgagtcatatttaaatattaaaaatattttagcagcagccgtaggcatcggggcacaagctattcatccgggatatggttttttatctgaaaatgcagaatttgctcaaatgtgtgaagattgtggcttaacttttatcggccccaaggcggaaacgattgatcaaatgggcaataaggaacatgcgcgtcaattgatgatggcacacaatgttcctgtaactccaggatctaatggagttattaaaaatgctgaagaagctaaaaaaattgctgctcaaattggttatccagttttgattaaagcaacagctggcggtggaggcaaaggaattagacaagtaactgatccaagtcaaatggccgaagctttagcggctgctcaaagtgaagctaaaaatgattttggagatgatcgaatgtatctcgaaaaggtaatgcaaaatgtaaagcatattgaggtgcagatttttcgtgatatgtacggtcatacggtttatttccctgagcgtgactgctctttacaacgaaataagcaaaaagttttagaggaaagtccttgcgatttaattacggaaaatgaacgtaaagaattgggtgaggttgcggttaaagctgcccgagccgcaaattatgttaataccggtacaattgaatttttgatggatcaagatcatcatttttattttatggaaatgaatacgcgtattcaggtagagcatactgtaactgaaatggtaaccggtgttgatttagttaaagcacaaattcaggttgcgaatggaggaccactgccttttacgcaaaaagatttacgggctaaaggtcatgcaattgaatgtcgaattaatgcagaggatccagcaaataattttatgccatcaattggtaaagtttcgtacttatatttaccagttggcaatccggggatgcgcattgataccgccttatatcagggacaacaaatttctccttactatgattctatgttagctaaggtagttgctttgggcaatacacggaaagaagcgattgctaagatgaaacgcttacttgaagaaatagttctgcaaggtattactaccaatcaagaatttcatttaaatatactaaatgatccaacttttattaaaggtgactttaacaatacttaccttgaacaaggctttatgccgcaatggaggagtgaaataaatgaaactatttccgcataaaaatactcctactgatacacatattaaagcaaataaagcggctgatgatcgagtacctgatggactgctgcgcaagtgccccaaatgccatcatgaaatatttgcgaacgaattaaataaattctatgaatgtccatattgtttttacggctttagaatctctgccaaaaaaagattatcgtggttagttgatcaagtacaggaatgggataaggatattgagtcctcgaatcctttaaaattccccgattatcaaaagaagatcaaacatgctcaaaaaattagcggcttaaaagaatcagtttggacaggcttagctaagattaaccaaacgcaattcgccttggctattatggatccaacttttattatgggatcgcttggtcaaatgactggtgaaaaattaacgcgtttgtttgaaaaagcaacgcttcagcatttaccagtcgtactgtttgcggcttctggcggagcaagaatgcaagaagggattcttgctttaatgcaaatgggcaaggtatctaatgcagtagctaggcatagtcaagcaggtcttttttatttagtagttttaacagatcctactactggtggggtgacggccagttttgctagtcaaggagatattattatagctgaaccacatgctatagtgggttttgctggtaaaagagtaatcgaacagactattcatgaaaaagtagcggcagatttacaagatgcagagaacgttttgaatcatggttttattgaccatattgttagacgctcacaggaaaaaagaatcattgaatggttaatcaaggtaggtggctatcatgactaaaaatgcaattgatatagttaaagctgcaagagatgaaagtcatatctctggtcatgagatacgcaaacttctttttcccgatttttttgaattgcatggtgatcggtgtggtactgatgatcctgctatagtaggtgggctagctacttttaatcaagagccagtaacagtaattacaactagcagaggacatttacttaaagaaagaattcaaaaacactttgggcagcctgaaccaggtggttatcgtaaagttctgcgtttaatccaagatgcaggtaagtttaggcgacctgtttttttgtttgttgatacagctggcgcttatcctggtaaaagtgcggaagaaaacggccaaggacaggcaattgcacaaaatttgcttaaagttagtcaaatacctactcctattattacggtcatgtatggagaaggcggctctggtggtgctttagcgcttgcctgcggagatgaagtttggatgttggaaaatagtatttattctgttttatcgccagagggctttgcttctattttgtggaaagatgtaaaaagagcaagtgaagcggcggaagtcatgaaattgacgcccgatgatttactcaagatgaatgtgatcgaaggtatcatcgccgaaccggataatcatcaagaggtttgtcaaaatatagcagaaaagctgcaaagtgagataaacaaattaagtaaattatccgaggcagaattgcttgctaagcgatacgaaaggtttagaaagttttagaggtaaaaaatgagtggatttttagcaggaaagaaaatcttggtaatgggtgttgccaataatcggtctattgcatggggatgcgctcaagcaatggaaaaacagggagcaaaaatcatttatacttaccaaaatgagcgattaaagaaatttattagcaaattagttactgatgaagattgcctgattgaatgcgatgtggcaagtgatgagagtattggacaggcttttggtttgattcaatctcgttttggcaaaattgatggcattgttcacgcgattgcatttgctgagaaagaagaattaggtggctcaattttaaattccacaagagagggattcagccaagcagttgatatttcagcttattctttcttggctgctgcaaaagctggaatcaaaatcttaaataatcctgcaagccttgttactttaacctatatgggatcagaacgtgccttgcctaattacaatactatggggattgctaaggccgctttggaatcggaaatgcggtacttagcgcgagacctgggtgaaaaaggtgttcgggtaaatgctatttcagcaggagctatgcgcactctggctgtctcaggaatccagggtcatgcatcattattgaagatttctaagagtaagactgttgatggtgttaatgtgacacaagaagaggtaggtaatacctgtgcttttttgatgagcgatttggctagtgggattactggagatgtaatttttgtagacaaaggtgtacatttacgctaatgcaaatttacaaatatcgaaaggttacttcaacacaagatcttgcaaaaaaatatttagcaaataaagctcaagaaattgctgcatttatagcacaggaacagacggcaggttatggcaagaggggacgctccttttattcaccagctaaaacaggtatttatttaagtattgcgcttcctaattttaagtttaaattagagcatgcaggcttattaacaatagctattggggtagcggtagttcatatactacaagaacaatttccttcgtatgaatttcgtttaaaatgggttaatgacatttatttaaatgataaaaaagtagctggtattctaaccgaaaaaataggattaggtttggtaataggaataggggtgaatatttttacggcatctttcccaaaaaatatctcaaatcatgtcggcagtattgtacaagctgattatgcttttgagaatatgaatgagcagttaattcgagctgttgtgcaggctgctaatacatatcaaaataataaatttttagacgagtatcgcaaaatttcttatctgaaaagtaaagttataactttgaaaataaatcattattatgtaacaggtcgagtagtgacaattgatgatcaaggacggttagttattagttgtcgaaattctacacgttgctattcaagtggtgaagttattaaggtggaattagaacccggatttaagggtaaacagtaaaatagtacaaaaaaagacttgagaagtaatttttctcaagtcttttagtttgtcttaatttaggttaattaaaacttgttcttgtccaaagcaactggagaatctggcttttcaccattgatcatcttcaagttgttgtcaaatgccttaacaaccatgttacgtacagcgtgggtggtgtagaaggcggtgtgtggagttaccaaaacgtttggacgatcaattaagtcagctaaacgcttgtctgggaattctttaccttcccaatcttcgttaaatacaccaacttcgtcttcgtaagtatccataacaaagccaaagatcttacctgagtccaaaccgcggataacagcgtcagtgtcaacaagtggaccacgtgagcagtttacaattacaacgccatctttcatcttggcaattgattcgtaattgatcatgtgtacatttgctggaacatctggtacgtgaagtgaaattacatcagcttgcttgtacaagtcgtcaagtgagtcaacgtagtaacccttcttttcgagttctgggttcttgaagatatcgtaagcaatgacctttgcgccgaaaccttccataattctcataaatacttgaccaatgtgaccagtacctacaacaccaacaacttggtcacgaacttcacgaccaatagtaggtgcccaacgtaagtcgcgcttagccatcttttcgtccatacgcttgtcttgacgtaatacacgagcagcttggattgcagcatgttcagcaatagcgtcaggagagtatacaggaacgttagtaatttcaaagccaagttccttagccttgtccatgtcgatgttgtcgacaccaacgttacgtaatgacatcttagttacgccagcgtctgccaatgcttgaagagtttctggggtgtagtctaattgttggtaaacaacaacaccgtcagcacccttagctaacttagcagtttcaggagtcaaaagcttatcagtgtaatctacatcgatatccttgtgagcatccttccattcgtttaagaatggttcttcgtctttacgaatagcgtaagcaaaaatctttgtcataaatttaacctccgtaaaatttattagtatgaccagtcctcattatacgcttttacttgctcaacaaaacacaaaagaaccatttttttgtatagattttaagaaaaataaaagtcaagttttactctgagcaaaaaagttgcaattttttcaaaaaaagtttatagcctaaaaattgcaactattattaactgttacctaatctcaatcccatagatatgaaaattatttttgtatatagcaatattagttaaaggtagtatatggatttgtataagagacgcattttcgttatataacccaggttatataatggactttaagtagagaaacaaacatagcggaggaaaattgaatatgcattttaaaggagaaagccaacagcatttcagcctaagaaagctgacaattggtgttgcttctgtaataatcgggaccacctttatgttttttggtggtcatgctgttcatgcagatgatttaagtagagatgctgagcaaaccagctcagttgttcaaaaacagagtagtgagaaaatagatgtagatgcagtcaaagaagctgataatgtttcaaatcaaagacaagacttacccagacggtactaagagtaccgcaactgttcctgtaactgtcattgcaccaaatgtaccagacgttatctacgtaccaaagggtgacaagtttccagacccaagtactgtagttactaactctaacgatatcaaggacaagattcctgacacgacttacacttggaaaactactccagatactccaaatactaaagtagtaattaactataaggctaataatcctggtactccagataccccagttactccaccagtggatccaggcgataatccagcaaccccagttaccccgcctgtaaagccagagcagaagccaacaacaccaactcctcatgctactaagacaccagcaaaggataatggtggcaagaagacagtagctagtgagcaaaaatctactttgccacaaacggggaagaaggataacgttgctttgactgctatcggtgtagctattgcagctgctggaagcttattaggattagcagatagcaagaagcatagatcttaatttgtaatatctaatttctgtttactaagaagcaagttgactcagataggagctagcttgcttttttgtctaaaagtttaaggatttctaaagacaaaaagcaaatagtgacgcattgtcataaagctgatattatatactcataacaaaaatacaacgcatcaaatagagatgaattgtaagaaggtaacaaatcttctaattccttattaatacatcctattgggcctttattaattcatacattgggtattgctttttgctggttgtcccctatgcaaccgcgaaagttaagattgataataagtccatcccctttttgcgaaggtaaagagtcaagaccccctgcaacatctcttgcgttgaatcttttgttaatcttgataatttatcttcgcaacattagtgatgagtaggctaatgtaaaaaaatctcgttattctcattcaacacaactcccttaaaagggctggtttagaaaagtcatctaaatcagtcctttttctttttttcgttataattaaacttgagaactaaaacaaaggggaagaaaaatgatcttaatttcatggaatatcgattcattaaatgcagctctgactggtacttcagctagggcggaagaaacgcggcaagttttaactaaaattcatgatgccaatccagatattattgcgattcaagaaactaagctgcgtgcaactgggccaactaaaaaacataaagaagtgttggctgaaaagttccctgagtatgactatgtttggcgctcttcagaagaaccagctagaaaaggctatgctggtacaatgtatctttataagaaaggattaactcctgcagtgtctgagccgattattggcgcccctgagccgatggatcatgagggacggataatcacactggaatttgataaatgctttgtcacccaggtttatacgccaaattcaggcagtggtttaaagcgactagctgaacgtcaagtttgggaccaaaagtatattgaatatctgcaaaaattagatgaaaaaaagccagttttagctagtggtgattacaactgtgctcataccgagattgacttgaagcatcccgaaaataatcatcactcagcaggttttactgatgaagaaagagtcgactttaccaatttgctcaatgctggctttaccgatacctttagaaaagttcatggtgagattactggcgtatattcttggtgggctcaacgtgtcagaaccgctaaggctaacaactctggctggagaattgattactggctagtaagcaatcgcattgctgataaggtggtccgctcagagatgatcgatacaggcaaacgagcagaccactgcccaattttgcttgaaataaatctttaaattgaagcaagccctagtataatttctttttgaaatgtttttattttgaaaaagaagtaggggttgaaattctttgaataacgagaaaaaagaagattgggctttggagcaggatctgaagtacaatcgtctgacagcatttaagctattcgcgatgactagttcaatggttatttccgttgatgaactcgcaccatttggtaaaactggagcaacggcactgttttacttgttaattgctggaatcgcttggtttatcccgattacgcaaatggctggagaaatggcctcaattgatggctgggaaaaaggcggaatcttcacttgggtgaaaggatctcttggagacaaaacaggctggacagcaatgttttatcaatggattcatattactgttggtatggatacgatgatgtatgtgatcattggggcattgtctatcacatttgggacaccttggttcaacaccacgccaatcgtacgcttcattttaatgatggttattctgtggggagcaacagcgattcaggtaattggtgttagaaagattggtcgaatcgctgaatggctgtttattctggggattgcgacaccagtaattttattgattatttcattcttcgtatatgtgattcaggggcatcccttgcatatgacgattaactggaatactgtaattccacataaattgaatggtaatacattagttgcctttgtcccatttatgttggccttttgtggtggggaagcttctgcaccgcacgttaaaaacttggaccacatcaagtcatactcaaaagttatgcttggcttagccgttactgcaatctgcttcgacttgctaggtagtatggcaattggaatgactgtgcctaaggatcaaatagagaacagtacaggctttgtttatacctatggcaagctgttaacgtcaatcgggctacctggtgatctgttgcaaaaaattgtgggtataatgttagcctgcggtattattggtgagctaggcaactggattgctggtcctaatcagggaatgtatgaagcggctaaagagggctatatgcctaagttttttgctaaaaccactaagcacggcgtgccattaagaattatggttttacaatcaagtatcgttaccatttctgcattattgattacttttaccagtggtgccgatgcagattttgcgtttaacgtttcattggccgcaacgacggcgcaatatctcatggtttatatgattatgttgattgcttacatggttttgaaaagaaagcatgaagattatcaccgtatgtattacatgagcaagaaccctaatttgagtattgcaattgcggtgcttgcattaatcatcacggttatagctttctttgtaacttttgttccagcacaaggcacgccaagcaatttgcgtcacgtttatgtttggaccttaatcggcatgtgtgccattgtgtcgattttgccacttattttgtatcgctggcatgaaaaatggcaatcacaatagaattaagaagcattcgtttttcaagacggatgcttttttagtagaatttgagagaggtgaataaaatggcggatgcgatgagggatgcaatattaaatggttttgttgatcaaaattatttaggaagtgaagaattaggtcctaaaatattagctaataatcagcaagagagaatctggcagaatttgcgccaggaattgtatagttgcaagtcctttacttgggcggttgcgtttattacgcaagacatgctagttccgtttaaggtgataatggcagatttagcgaaaaatggaattagtggcacgattattactggtgattacttgggttttaacaatccgcgtgtttttacggaattacaaaagattcctaatttagaagttcgtattgctaataaggcaggtttccatactaaaggatatttatttgatcatgaaaactatcaaactgtgattattggcagtgctaattttacacgttcagctctgctggctaactatgagtgggctttgaaagtaagttcaaaaaagcaagcagatttaacagctcaattagtggataaaattgcagatttgaaacaggatagttttgttttaaattcagcctggctaacagattatcgtaaaaattgggtaaagcctgagcgagttgctactgatcggcatcagacaaaaattttaccaaataaaatgcaaaaagcggctttaaaacagatagaagcactagttacaagtggtgaaaaacgagggctagtagtgtcagccacaggaacggggaaaacttatttaggtgcttttgctgttaagaaatatcagccgcggcgttttttatacattgtgcatcgtgagcaaattgctaaaaagtcattagaaagtttttatcgtgtaatcggtggaccaagatcggattatggcttattaacgggaaataggcacaatttacaggccaagtatttatttgcgacggtacaaacgataagtcaacctgagatgctggctaattttaatagcgatgaatttgattatatcttgattgatgaagcacacagggcagctgcaccttcatatcagcgccttttacattattttaagcccaatttttggttaggaatgacggctacgcctgaacgaatggatgagcaaaatgtttaccagatttttgactacaatttggcatatgaaattcgtttgcgggatgcactggaagagaagatgctggcgccatttcattatgtgggtgtccaggattatgaagcagacggagtagtgattgatgaaacaacagatttacgctacctagcttctacatctcgagtagactatgttttaaaggaattagactattacggctattgtggaacaaaggctaaaggcttggttttctgcagtcgacaggatgaagcacgtgaattagctcggctttttagtcaaaaaggacatcccgctgtagcattgaccaatgaggataatgaaaaaagacgtaatgaagtggttgcgtctttagttaaaggtgagattgagtatattgtagcggttgacttgtttaacgaaggaatcgacatccctgccttgaatcaaattgtgatgttacgcaacacacagtcgagcatagtgtttatccagcagttaggccgggggcttcgtaaatatcctggcaaagattttaccgttgtgctagattttatcggcaattataaaaacaattacatgattccgttggcactgaatcaggatacttctcgaagcaaagatcaagctaaacgagaaacgcgtctgccaagctttattgatgtttcaacgattaactttagtaaaattgccagtgaaaaaattttggcttcgcttgatagtgtcaagcttgatgggatgcgtgaattgcggcagagttaccatgatctcaagaacaaactagggcgtgtaccgctactatttgatttttatcaatatggctcagttgcaccgattgtttttgcacaaaatcatggcttggcaagctatgctgactttttgggtaaaatgggcgaagacgttaatttatcaaaatatgaaaatgaagtgctgtcttttgtgactaaggaattacttaatggtaaaagaattcacgagttacttttgttagagatgctacttgaacaagatattgttaagcaagaagattatctagctcaattgaaacgacaccatgcttatgtaaatgatgaattgttagcttctgttgatgcgattttatcgctagatttttttgatattaagcagggaaagactaccaaaaaagcacaatatggtaaattgccgttagttgaacgtagcaatttatttgactatcaattgaatggttctctacgctctgccctagatcaacatgattttaagaatttatttgttgatgctattaaaactggtttggccttaaatcaggaatatgataatcagcgtcaatttactttatatcagcaatatgatcgtaaggacgcttgtcgactcttgaactggcctaaggatgtttcggccccgatgtatggctatcgtgttggtgagcaggacacaccaatcttcatcacttatcataaagatgatcatgaaaagcggaatgctctgtatcgtaatacattggctgatgggcgcagtttgcgctggtatactcgggtaccacggcatttagattctgatgaggtacagcgtttgcttaatacgcgagggatgaatttgcatatatttgttaaaagaagcgatgcagatggtaagcagttcttttatttaggcaaggcaaagattcaagctgattctgttcgcgaagaattgctcggtgttaagaaaaagccagctgtagggatgaacttaatgttgaaacatccactgagtgagtcaatgcatgagttattatttgaatagaccaaaaaagcctttccgcttaggaaaagcttttttaattgccgctaatattaattagatcttggtcatcttggttattatccttatcaaacattctaggcttgatgtgatctagaatcttagtcccgatatttttctgagcagtttcatcaccgctaacctggtttaaaaacataattattccatatcgattatctgtagtcattttgatccaattaccaaaatgagtgttgcttaagctaccataagcagatttagtatggtcatcatctaaatgaagccctccagaataattagtggttgcacttttaagatgagttaagtaatagaaatcggatttgcttaagatactaccattggttaagccaagctggatcttgtaataatccattggggtagtgaacatattgcctgcgcctggaagctgggaggcaagagtctttttaacgtattcagcgtcttggtaatttttaccattattccagacgtaagagataggatcggttttccaactaggaatatcctgataaaggaatgtattagcaagccctaatttgttaatgatgcgattattgaaattgttttcgtaggattgtccgctgattttaataataattccggctaataaaagatagttggtattattgtagaagtaggttcctggtgtcccttgagtgccgttattagtattatcaatagcccaattgatggcgtcattctcacttaaaacttttccgcgatccaattcagtattggttgcttgaatgccagaagtatgggtcattaactgtccaatagtaatattatcggcgtttttaagattagggtaccaacgtgaaattttggtgttttgcgtaaatttttgactagtgtgccagttttcattcatcagctgaattatcattgctgctgtaacaactttttgcaaagaagcagttggataaactacgttgtcgttcccattaccaacttttttaccgtaccaagcgtagccatagctgatttgttgcggctgaccgtttttgataatgacgatactaccgcgagtattgttttgagccaaagtattgcggacaaaatttcgcatttcggttttaaagtatgaactggcttgaacttgtggtggttcagtgatcgcaaatgcaggaactgtcgttagcagcgcagcggtagctagtccaataattgattttttcaaaaattaaaaggcctcccttaaaaagtggtttgtttacattttagcgcgttctttgcatcggacaaactattatcttggtgaaaagacgtatttttagctagcttgttgaaaaagtgcggctaattttgctctgagtgcgggatcatgagcgtataaataggtaccgcggattcctcgcttgaatagaacgttgagtgaattcatgaccatcttctcttcatattctattttttcttttgagttggttagatcattacgctttttgaacatctcaacatctgtaattttgtctaaattaactttaagttgattggtgcggggaatcaggctgattggtggaccgataatgatgccagcataatttaggtcaaaaccttggcaagtatagatagaaccaacttcattgattgttgtaggaatttctgcccaaggagttgatgtgtagttgtattgatcccatggcagcataaatttcccttctttaatgtaatgtttgccaccatcaagagtagatggatagccggaagttgaaagaattcttgccaggccgtctgtttgatttctcttgacgatttcttgccgcattttttctgcatcagtaaaaatacgaaagtcgtagttgtgccacatttctttttttaagggcattaatttattatgtgtaaaaaagttaaaccattctattagactatctggtgccatcattctaaattgatgatgtagttgatagtcttcgtggggataatgatgagtaattgcttcaagtcgcttacgtgtccagaagcttttcattcgtaaaacttggttttcatcaaataccaaaatgataacttttgaccgcttaataacctcctctaattggttatcgtgataaaagttgttgtagtgatcaggctgagataagagcaagtgtgcttcatcaatgacgacaacatcagcactggtttgttttttgtccatctgattaataaatgaagttggccgcatataatttttcttatatagttctttaatcggcccagcaatctgcttatagacttttagcagttcagggtgatttactaaaaagtagttttgagttttatacagttggctgcctgtttggtggtttaatttttgcaactgatcaaaaagggcagaaagcactacacttttaccagtacctgcttcaccataaatagtgaaaacagcaggatgatttttattgctgcaatgtgtaatcgaaaaatgtaaaattttttgtacgagaagtgattgctcttggttgagctgatggtaaggagagagtttaaaacttgcttgattattcaatatttattcacctcgttttcaattataatgaatagaaataataatgataaaggaagaaaacatgactgcacaaaaaataattcacaatcggctatttttaagacaaaaatctgatttagctggcaaaaatgatttacaagttgcgataaacttgcgtgatacgctactagctaatcgtgggaaagctgcggggctggctgcaaatatgattggtcagactaaacaaattattgcgttttatgctggcccgcttccatttgtaatgctgaatccgcgtattattcaaaaaaagcagatgtatcttgctagtgagggatgtctgtcactagaaggcgagcgtaatgttcagcgctatgaagaaattactgttacttatcagaatatggagttagaaacagtaacgcaaacttttggtgactttatagctgaaacgattcagcatgaaattgatcattgcaatggaattctgatttgaatagtagaatatttacgtgattttgcaaaaaaagtaaaaaaatttaaattaattttgcatggtttcagggatgaaaacccacaattttcgaataattagatttgatagaataaaatactttttaatttaatgcaaagataaagaaaaatatattacaacactacctagtgtatcgtgaagaacccgaacgaagagcaagacttgccaaagcggagaaaataaggtaaattaataaagtcgcttcgagagatgcgacgagagcttaaaaacagacatgcaaggaaagaaaacaaataaaaagaaaaaagtacttgcaaagaagtaaataagctggtaatatatttaaatgtcgtcaggtgaaagcagaaaaagcttgagtaagacgaaaaaacaaatcaaaaaagttcttgacaaagaaatgatggtttgataaaatataaaagctgtctgctttgcaaaaaaagcaagacagaggtagtactttgaaaactgaacaaagtttcgctaaaagtgtgcgggtgtaaaaaaccaaacaagaagcgaagtcaattcgcaagcaataaatttgagacaaagatcttaaataaggaatgagcaatcattcaaactttttaaaatgagagtttgatcctggctcaggacgaacgctggcggcgtgcctaatacatgcaagtcgagcgagcggaactaacagatttacctcggtaatgacgttaggaaagcgagcggcggatgggtgagtaacacgtggggaacctgccccatagtctgggataccacttggaaacaggtgctaataccggataagaaagcagatcgcatgatcagcttttaaaaggcggcgtaagctgtcgctatgggatggccccgcggtgcattagctagttggtaaggtaaaggcttaccaaggcgatgatgcatagccgagttgagagactgatcggccacattgggactgagacacggcccaaactcctacgggaggcagcagtagggaatcttccacaatggacgcaagtctgatggagcaacgccgcgtgagtgaagaaggttttcggatcgtaaagctctgttgttggtgaagaaggatagaggtagtaactggcctttatttgacggtaatcaaccagaaagtcacggctaactacgtgccagcagccgcggtaatacgtaggtggcaagcgttgtccggatttattgggcgtaaagcgagcgcaggcggaagaataagtctgatgtgaaagccctcggcttaaccgaggaactgcatcggaaactgtttttcttgagtgcagaagaggagagtggaactccatgtgtagcggtggaatgcgtagatatatggaagaacaccagtggcgaaggcggctctctggtctgcaactgacgctgaggctcgaaagcatgggtagcgaacaggattagataccctggtagtccatgccgtaaacgatgagtgctaagtgttgggaggtttccgcctctcagtgctgcagctaacgcattaagcactccgcctggggagtacgaccgcaaggttgaaactcaaaggaattgacgggggcccgcacaagcggtggagcatgtggtttaattcgaagcaacgcgaagaaccttaccaggtcttgacatctagtgccatttgtagagatacaaagttcccttcggggacgctaagacaggtggtgcatggctgtcgtcagctcgtgtcgtgagatgttgggttaagtcccgcaacgagcgcaacccttgttattagttgccagcattaagttgggcactctaatgagactgccggtgacaaaccggaggaaggtggggatgacgtcaagtcatcatgccccttatgacctgggctacacacgtgctacaatgggcagtacaacgagaagcgagcctgcgaaggcaagcgaatctctgaaagctgttctcagttcggactgcagtctgcaactcgactgcacgaagctggaatcgctagtaatcgcggatcagcacgccgcggtgaatacgttcccgggccttgtacacaccgcccgtcacaccatgggagtctgcaatgcccaaagccggtggcctaaccttcgggaaggagccgtctaaggcagggcagatgactggggtgaagtcgtaacaaggtagccgtaggagaacctgcggctggatcacctcctttctaaggaagcgaaggatatggagagcaggaatgctaagagaagtatccagagcaagcggaagcacactgagaaactttgtttagttttgagggtagtacctcaaaaagagctagtacattgaaaactgaatataatccaagcaaaaaaccgagacaatcaaagagaacagattgtagagcgaccgagaagagaattcttgagtaaggtcaagtagaaaagggcgcacggtgaatgcctaggcactaacagccgaagaaggacgtgacgaactacgaaaagcttcggggagcggtaagtacgcagtgatccggagatatccgaatgggggaacccaatgcagagatgcattattgattagtgaatagatagctaatcaaaggaagacgcagtgaactgaaacatctaagtagctgcaggaagagaaagaaagatcgatttccttagtagcggcgagcgaagaggaaagagcccaaaccaagtgatttatcatttggggttgtaggactgcgacgtggcagtgtaagagatagttgaattatctgggaaggtaagccagagagggtgagagccccgtaagcgaaatctcaagcacgcctagcagaatcctgagtaggccgggacacgaggaatcccggttgaaaccgcgaggaccatctcgcaaggctaaatactagttagtgaccgatagtgaaccagtaccgtgagggaaaggtgaaaagaaccccggaaggggagtgaaaaagaacctgaaaccgtgtgtctacaagtagtcaaagcacattaaagtgcaatggcgtgccttttgtagaatgaaccggcgagttacgttatctagcgaggttaagtcagaaaagacggagccggagcgaaagcgagtcttaatagggcgaaaagttaggtgacgtagacccgaaaccaagtgacctacccatgaccaggctgaaggtgtggtaaaacgcactggagggccgaacccacgtaagttaaaaattgcggggatgagttgtgggtagcggtgaaattccaaacgaacttggagatagctggttctctccgaaatagctttagggctagcctcgtggagaggataatggaggtagagctctgtttggactaggggcccgtcaggggttactgaatccagataaactacgaattccagatatccatacacgggagtcagactgcgagtgataagatccgtagtcgaaagggaaacagcccagatcaccagttaaggtccccaaatctatgctaagtggaaaaggatgtggagttgcgtagacaactaggacgttggctcagaagcagccatcattcaaagagtgcgtaatagctcactagtcgagtggcgctgcgccgaaaatttaccggggctaagcatagtaccgaaactgtggatgtgttttaaagagcacgtggtaggagagcgttctaagagcggagaagttgaatcgagaggatcaatggagcgcttagaagtgagaatgccggtatgagtagcgaaagataggtgagaatcctatccgccgaaagactaaggtttcctggggcaggctcgtccgcccagggtaagtcgggacctaaggcaaggccgagaggcgtagtcgatggataacaggtagagattcctgtactgtgtcaaatcgttaagagcgaaggagggacgcaggaggtgaagcacgcatcgcgatggaacgatgttcaagcaacaagtgcggttaagagtcaaatgcttctaaccagcaacacgagttgtgaagaggagtgaattaaaagtagcgaaggtgtggtaatcacactgccaagaaaagcttctagccagagatgacatacccgtaccgcaaaccgacacaggtagtcgagtggagaacactaaggtgagcgagagaactctcgttaaggaactcggcaaaatgaccccgtaacttcggaagaaggggtgctagccaagagattggttagccgcagtgaataggcccaaacaactgtttatcaaaaacacaggtctctgcaaaatcgtaagatgacgtatagaggctgacacctgcccggtgctggaaggttaagaggagagcttagcgtaagcgaaggtttgaattgaagccccagtaaacggcggccgtaactataacggtcctaaggtagcgaaattccttgtcgggtaagttccgacctgcacgaaaggtgtaatgatttgggcactgtctcaacgagagactcggtgaaattataatacccgtgaagatgcgggttacccgcgacaggacggaaagaccccatggagcttcactgtagcttgatattgagtatcttttaaacatgtacaggataggtaggagccagagaagataggacgctagtcttattggaggcaatgttgggatactacccttgtttgaaggatgctctaacctcgacctgtaagccaggccagggacagtgtcaggtgggcagtttgactggggcggtcgcctcctaaagtgtaacggaggcgctcaaaggttccctcagaatggttggaaatcattcgcagagtgtaaaggtataagggagcttgactgcgagagagacaactcgagcaggtaggaaactaggacttagtgatctggtggtaccgtatggaagggccatcactcaacggataaaagctaccctggggataacaggcttatctcccccaagagttcacatcgacggggaggtttggcacctcgatgtcggctcgtcgcatcctggggctgaagtcggtcccaagggttgggctgttcgcccattaaagcggcacgcgagctgggttcagaacgtcgtgagacagttcggtccctatccgtcgtgggcgtaggaaatttgagaggagctgtccttagtacgagaggaccgggatggacgcaccgctggtgtaccagttgttccgccaggagcatcgctgggtagctatgtgcggaagggataagcgctgaaagcatctaagtgcgaagcccccctcaagatgagatttcctttgcgtaagcagtaagacacctcagagacgatgaggtagataggctgggagtggaagtcctgtgaaggatggagcggaccagtactaatcagtcgaggacttgaccaaagcgaagcaaactggaaggttttttgcgagaaggattatgtttagttttgagtgtaaaagctcaaaagagtacggtggcgaaagcaagaaggatacacctgttcccatgccgaacacagaagttaagcttcttaacgccgaaagtagttggtgggcaactgcctgcgaggaaaggaagctgccgtgctcttttttaatattccggcttagctcagttggtagagcgcttgactgttaatcaagatgtcgtcagttcgagtctgacagccggagtaaaggggagaaggaagcggaagacttcttttttgtgccttttgggtatgttaaaaggctaattaggctaagcaagcatgacttgagggtcaaatttaatataatcattaatagaagacatagtaaaattcctaacaagcttaattgaattgattacggaggctatgctctctttttaagtgcataaaaatcttatagatagatacgcgtggtgctagttaaatcgttctagacaataagccaaattataagctaaaattgcaatttccaaccggctttgaaagcctatcagactacgtgctcgattgttctcggcattgtaataggtcagaagcgaaaagtcgctttcaattgttctgcgaatagccatcaattgatgatcattgtgctttttagctcctgtcatatttttacgatatggtgtccaaagttcgtaacccatttgttttagctgttgatgcagttctttgcctaaatagccttcgtcgccaagaagatagtaattagatggatgggtattttctatcagttcaactgtctccctggcatcatgaactgatgcctttgttacgacataatcaagaatgtaaccgtcatcgctaacaatggcatgaactttgaaaccatagaagtaaattttcttggtggccttataaccaatgttggcataaccgcgaaaaattttagcacgatagtttcgaattggttggcaaacaggtaccggaaagctgtcaatgatcaagaactgtccattcaggtcaacctttttattcatttcttgccgtatctgataaatcaattgcaatagctgacgtgaacgccgattaaaacgtgagtgtgataaacaattgaaacattcacagaatcttctttgtgattcaattcctgtcttagcttgccagataagtaaagccaaaatcagactgtccgtagttttaatttgatcaatatttcgccgatgagtaaactcagccggtgcatacaaacgataccagtgccgacaaattatcactaaatctttaaaactaacttgtaaatggtggctaaaacgcttaagcttaaggcagttcaatcagatcagactcttttctattattactatttacaagtcgagtctaacaagattggacttttttattaactaaaacgatttaactagcaccacgcgtagatagattattataaatacgcgtggtgctagttaaatcgttctaggcaatatgccatattataagctaaaatggctatttctagccgctgctgaaaaccagctaagcaaagaaaagtcgctctcaattgttcttctaattgccatcagttgatgatcgttatgctttttagcgcctttcatgtttcttcgatatggtgtccaaaggacatagcccataccttttaactcggcagttaagtcttttcctaagtagccttcatcgcctaaaagataatggttaattggatgagcattaatcatcaattctgtcgtttctttggcatcatgcactgatgctttagttcaagtacatagccatcatcgcttactagcgcgtgaaccttgaagccgtaataatagatttttttagtggctttctagccgatatcagctatgccacgaaagatcttgacgcgatagttgcggataggctgacaaactggaaaactgtcaataattaagaattctccagctgtttttacttcttgattccaatcttgacggatacagcgcattaaaggcaaaagcattcgtgcccgacgattaaagcgagaatgagacaaaccgacaaagaatttacaaaatcttctttgagattcgataccaatttcagtttgccaaataagcatcgctaagatggagctgtcagaaattttaacctgatcaacatttttacggtgcttcaattcatcaggagcacaaagcttgtacaaagaacgacaaattacatttaaccgagcaaagctaacttgtaaatggtgagaaaaacgattaagcttgagatagttcaattagatcggactcttttctatttaatttaagttacaacttgagtctaatccgattggacttttttattaactagcaccacgcgtttataaatattcaacgacagtaaaattaggtaagcaatctatatctaggaatctgttggggttctgattgtagtaggctaattatacaaaaatgagttaacaaaattctgatcagaattagtacggttaagattgaaaaaatagctggtaattattactgtatctctttgtaattaggtagcaatgctattttttacttctaaaatataattaaaccggtcagacaattcgtattgatctgaatttggataaacagttataacaaaactatgtgtgcaaagcagatgacagggacttttaattgatctcgtatgttggagcgcgctgtgttgactatttgttctaagtgaacagatgataagtatgcctctatctaagtaccaagatctaggaaattcattctgaagtagttaatatgtgtcaatatgtcgcacaaaggtaactatgaattacagcaacataagagaaatttgaaaaatagtttttaaattgtggcttgttattagtgaaaatgataaattaaatattattttggcagaaaatacagcttaataacaaaaaataaaaatattttttgcttacctttaaaaatatagttcgagatttataaagtttttaacgagttaaagtgatatttctataattgaaagcagattctactaatgtaattactataatcagaataaatatttcataaaaatacatagaacccgaacgaagagcaagacttgccaaagcggagaaaataaggtaaattaataaagtcgcttcgagagatgcgacgagagcttaaaaacagacatgcaaggaaagaaaacaaataaaaagaaaaaagtacttgcaaagaagtaaataagctggtaatatatttaaatgtcgtcaggtgaaagcagaaaaagcttgagtaagacgaaaaaacaaatcaaaaaagttcttgacaaagaaatgatggtttgataaaatataaaagctgtctgctttgcaaaaaaagcaagacagaggtagtactttgaaaactgaacaaagtttcgctaaaagtgtgcgggtgtaaaaacccaaacaagaagcgaagtcaattcgcaagcaataaatttgagacaaagatcttaaataaggaatgagcaatcattcaaactttttaaaatgagagtttgatcctggctcaggacgaacgctggcggcgtgcctaatacatgcaagtcgagcgagcggaactaacagatttacctcggtaatgacgttaggaaagcgagcggcggatgggtgagtaacacgtggggaacctgccccatagtctgggataccacttggaaacaggtgctaataccggataagaaagcagatcgcatgatcagcttttaaaaggcggcgtaagctgtcgctatgggatggccccgcggtgcattagctagttggtaaggtaaaggcttaccaaggcgatgatgcatagccgagttgagagactgatcggccacattgggactgagacacggcccaaactcctacgggaggcagcagtagggaatcttccacaatggacgcaagtctgatggagcaacgccgcgtgagtgaagaaggttttcggatcgtaaagctctgttgttggtgaagaaggatagaggtagtaactggcctttatttgacggtaatcaaccagaaagtcacggctaactacgtgccagcagccgcggtaatacgtaggtggcaagcgttgtccggatttattgggcgtaaagcgagcgcaggcggaagaataagtctgatgtgaaagccctcggcttaaccgaggaactgcatcggaaactgtttttcttgagtgcagaagaggagagtggaactccatgtgtagcggtggaatgcgtagatatatggaagaacaccagtggcgaaggcggctctctggtctgcaactgacgctgaggctcgaaagcatgggtagcgaacaggattagataccctggtagtccatgccgtaaacgatgagtgctaagtgttgggaggtttccgcctctcagtgctgcagctaacgcattaagcactccgcctggggagtacgaccgcaaggttgaaactcaaaggaattgacgggggcccgcacaagcggtggagcatgtggtttaattcgaagcaacgcgaagaaccttaccaggtcttgacatctagtgccatttgtagagatacaaagttcccttcggggacgctaagacaggtggtgcatggctgtcgtcagctcgtgtcgtgagatgttgggttaagtcccgcaacgagcgcaacccttgttattagttgccagcattaagttgggcactctaatgagactgccggtgacaaaccggaggaaggtggggatgacgtcaagtcatcatgccccttatgacctgggctacacacgtgctacaatgggcagtacaacgagaagcgagcctgcgaaggcaagcgaatctctgaaagctgttctcagttcggactgcagtctgcaactcgactgcacgaagctggaatcgctagtaatcgcggatcagcacgccgcggtgaatacgttcccgggccttgtacacaccgcccgtcacaccatgggagtctgcaatgcccaaagccggtggcctaaccttcgggaaggagccgtctaaggcagggcagatgactggggtgaagtcgtaacaaggtagccgtaggagaacctgcggctggatcacctcctttctaaggaagcgaaggatatggagagcaggaatgctaagagaagtatccagagcaagcggaagcacactgagaaactttgtttagttttgagggtagtacctcaaagatttgaaaaacgccaagcgttagtcgggcctatagctcagctggtttagagcgcacgcctgataagcgtgaggtcgatggttcaagtccatttaggcccattgacataacgaagaaaaagagttaaagttatgtctggccgaaaataaaatactctgggggcttagctcagttgggagagcacctgctttgcacgcaggaggtcatcggttcgaacccgttagcctccattgatccagaaaaaggatcaaagagctagtacattgaaaactgaatataatccaagcaaaaaaccgagacaatcaaagagaacagattgtagagcgaccgagaagagaattcttgagtaaggtcaagtagaaaagggcgcacggtgaatgcctaggcactaacagccgaagaaggacgtgacgaactacgaaaagcttcggggagcggtaagtacgcagtgatccggagatatccgaatgggggaacccaatgcagagatgcattattgattagtgaatagatagctaatcaaaggaagacgcagtgaactgaaacatctaagtagctgcaggaagagaaagaaagatcgatttccttagtagcggcgagcgaagaggaaagagcccaaaccaagtgatttatcatttggggttgtaggactgcgacgtggcagtgtaagagatagttgaattatctgggaaggtaagccagagagggtgagagccccgtaagcgaaatctcaagcacgcctagcagaatcctgagtaggccgggacacgaggaatcccggttgaaaccgcgaggaccatctcgcaaggctaaatactagttagtgaccgatagtgaaccagtaccgtgagggaaaggtgaaaagaaccccggaaggggagtgaaaaagaacctgaaaccgtgtgtctacaagtagtcaaagcacattaaagtgcaatggcgtgccttttgtagaatgaaccggcgagttacgttatctagcgaggttaagtcagaaaagacggagccggagcgaaagcgagtcttaatagggcgaaaagttaggtgacgtagacccgaaaccaagtgacctacccatgaccaggctgaaggtgtggtaaaacgcactggagggccgaacccacgtaagttaaaaattgcggggatgagttgtgggtagcggtgaaattccaaacgaacttggagatagctggttctctccgaaatagctttagggctagcctcgtggagaggataatggaggtagagctctgtttggactaggggcccgtcaggggttactgaatccagataaactacgaattccagatatccatacacgggagtcagactgcgagtgataagatccgtagtcgaaagggaaacagcccagatcaccagttaaggtccccaaatctatgctaagtggaaaaggatgtggagttgcgtagacaactaggacgttggctcagaagcagccatcattcaaagagtgcgtaatagctcactagtcgagtggcgctgcgccgaaaatttaccggggctaagcatagtaccgaaactgtggatgtgttttaaagagcacgtggtaggagagcgttctaagagcggagaagttgaatcgagaggatcaatggagcgcttagaagtgagaatgccggtatgagtagcgaaagataggtgagaatcctatccgccgaaagactaaggtttcctggggcaggctcgtccgcccagggtaagtcgggacctaaggcaaggccgagaggcgtagtcgatggataacaggtagagattcctgtactgtgtcaaatcgttaagagcgaaggagggacgcaggaggtgaagcacgcatcgcgatggaacgatgttcaagcaacaagtgcggttaagagtcaaatgcttctaaccagcaacacgagttgtgaagaggagtgaattaaaagtagcgaaggtgtggtaatcacactgccaagaaaagcttctagccagagatgacatacccgtaccgcaaaccgacacaggtagtcgagtggagaacactaaggtgagcgagagaactctcgttaaggaactcggcaaaatgaccccgtaacttcggaagaaggggtgctagccaagagattggttagccgcagtgaataggcccaaacaactgtttatcaaaaacacaggtctctgcaaaatcgtaagatgacgtatagaggctgacacctgcccggtgctggaaggttaagaggagagcttagcgtaagcgaaggtttgaattgaagccccagtaaacggcggccgtaactataacggtcctaaggtagcgaaattccttgtcgggtaagttccgacctgcacgaaaggtgtaatgatttgggcactgtctcaacgagagactcggtgaaattataatacccgtgaagatgcgggttacccgcgacaggacggaaagaccccatggagcttcactgtagcttgatattgagtatcttttaaacatgtacaggataggtaggagccagagaagataggacgctagtcttattggaggcaatgttgggatactacccttgtttgaaggatgctctaacctcgacctgtaagccaggccagggacagtgtcaggtgggcagtttgactggggcggtcgcctcctaaagtgtaacggaggcgctcaaaggttccctcagaatggttggaaatcattcgcagagtgtaaaggtataagggagcttgactgcgagagagacaactcgagcaggtaggaaactaggacttagtgatctggtggtaccgtatggaagggccatcactcaacggataaaagctaccctggggataacaggcttatctcccccaagagttcacatcgacggggaggtttggcacctcgatgtcggctcgtcgcatcctggggctgaagtcggtcccaagggttgggctgttcgcccattaaagcggcacgcgagctgggttcagaacgtcgtgagacagttcggtccctatccgtcgtgggcgtaggaaatttgagaggagctgtccttagtacgagaggaccgggatggacgcaccgctggtgtaccagttgttccgccaggagcatcgctgggtagctatgtgcggaagggataagcgctgaaagcatctaagtgcgaagcccccctcaagatgagatttcctttgcgtaagcagtaagacacctcagagacgatgaggtagataggctgggagtggaagtcctgtgaaggatggagcggaccagtactaatcagtcgaggacttgaccaaagcgaagcaaactggaaggttttttgcgagaaggattatgtttagttttgagtgtaaaagctcaaaagagtacggtggcgaaagcaagaaggatacacctgttcccatgccgaacacagaagttaagcttcttaacgccgaaagtagttggtgggcaactgcctgcgaggaaaggaagctgccgtgctcttttttaatattccggcttagctcagttggtagagcgcttgactgttaatcaagatgtcgtcagttcgagtctgacagccggagctagcggaatatgaaagaggcgggggccagaggcttccgcctttttgtgtgctattaaagttctataattaagcttttctaagtcttgaaatttttttaaatagggtttccaaggaactttgaggagtttgtactctgaatggtattgatggatacgttattttttctgccggaaagccacagaatggacaagtgggctgctttaaaagggcttcgtagactttgtattgcactccattgaagaatttatagaaattgttgtaaaaaacgatatttttatctttaatatcgagatcaaatttaatacaatcattaacagaggacatagcacaactcctaaatagcttaattgagacagaatatcataaatattcatcaacaggaaaaattatagagctaataaagaagttatagctttttatttgcgttatgaaatgtataaacttgttgtctttgtctctctattagactggtaaatattcaaaagtatatgttaaatttcagacattaaatacttagaaaaaaggacatatttagatggataaaaattctgatagacttacgttagtgccatatttcccgaatgaaaagcagactcttaaatggtaccaggatcctaaaatctgtaagcaggtagataatattgataccgtttatgatttaactaaattacgtcgaatgtatgaatatttgtcagtgcatgggtggtgctactatattcaatatcaagggaaattgattggtgattgtactttgctaaaagacggtgagatatcaatcgtgatttgcaaagaatatcaaaacttgcatcttggtagaaaatgtgtcgacaaattggtgcagcttgcaagaattcagaaaatgacgcaagtgaaggctcacatatatgactttaatattcaaagcaaaaaaatgtttacaagaatggggtttaaagagcaacaacctgactggtactcttatgatttatagatcaaaaatattcatgttaccaagtaattcatacaaacaatcagttggtgtgatgtcagataagcactcgtattagaaaaatgtaatcatcagtaattaaagactgtagttgaatcaaataattaactcagcgtataaaatgctgagttagacaaaaaaacaacgagcaattctctcgttgttttatggattcattttgatcaaatttttagtttatctttagttgtaaataccaacttgattaatgtgggccaattccagaactggagattgagcgaggtccaaactaacatcacagccagcatggataccattattttcgccattaagccagtgggtattattagttacgtcatagacagtaccattaaatgcaatataagctggacgtccatttttaccattgtaatttgatagagtttctttagtaaattttctcatataagaagctcctttctaataagatcttgatatattaatggtaacactttgtcaccttatagcaagagatacgaaggagtcttatgcttttcttatgaaagatgaccacgccacccagcaatatcccaatctagaaagtcataattaagctttttaccataaattttctcgtaggcagcaactttttgtcggtagtcgagttccatcatcttatgagcgttttcgttggcgtttagagaaacgtcagggaagattggtggtaaaacatggacaatatatttggtctcataaaaattaggatctttcttttcgattttaggtagatccttaatctcgacaaaagtggagactaccggtacattttgtttagccgcaaaataataggcaccacgttgtaatttgcgaggcttgcgataattccaccacatctcctgttctggataaattaaaacccaattatttttagctaaagctgcactgaggtgcttaggaaattcatttccaatatagctaggactctgaactagtggaatagtgccaacataattcattaaatagcggaaaaatcccggtagcattaggttagtatcttcaattacaattgaaagctgatggtgcatcttgttagcgagcagcttcattggtaaagaatcaacctgattgtagtggttagaagttaaaattgcgccaccaataggtaaattatttaggttctctaaacctacaaattcagttgatccagctaatgctctggataaagtaccaaataagagatgtccaatacgattattaagcttacttgaaaaagtgttacgcttattccaataatcattgaccaatttaaggcgctgatctagggacatttggggatcgccgatttctacttttgctgtgaagttacgttcattagcagctttttttatatttttaatcactgcctcacgattatcgccaaaaatcatagtgttactgcctctcgtttcttaacttttgcccaattattaggatcttgctcagttttgtcttccttagcaagcatatgatccaatttttcgcggtctgctgcacgctcgtcatcagtataattattgagttcgttctttaattcatcgaaaaactgcgtttgtttggcactatcccagaagtactgtgcatattggacattagcaaaatgccatggcttaaagaaaagattatagtgaatcagaccaggattagttaaaggttcagtgttttcatttggcatagcatcccagcgaggatttaagtgcaaaattctgccttccccgatttcatttaaatagtcttgatcaggagcaatacaatcaaaatgatacttttctaaaagtgtcataaaatggtcaataaaatgttcagcgcgaaaggccctagcattcatgacgagcatgccagagttaatgtatttcttggggtcaagtgccaggacatttttgatgtattttatcatcttgtctacatattgaattgaggagtcggtgcaagcagcaaataaattatcacccaattcggagttgtatagtttagcaagatcgtcgtttacaattgtgtcgctatcaatatagatcaccttatcatattcgggaaaaagttctggaataaagaggcgataaaaaatcgacatggtaaaaaagtcagcgcgaagaaagttttccttacgattttgaataggttgtacaagttgatcatcaatatggaaaaacttcacatgaacgtttgaactgctaagatcagacaaagctttttgatgctttgatgagagatcttgatttaaaaagtaaacagtataatccttatttggatctgtatgtttgactaaagaattaagagaaacagcagcgtatttggtaaagtcatcgctgatactgtaaaaaataggaattgtcataaaattacctttcttagattttaactgattccgtttgtttaaccttagcccaggtatttggctctttgacaatcatgtcaacttttttggccatccattctaggttagctcgggccttttgacggtcttcatcagtaaagttgtctaattgctgctttagttcatcgtaatacggcgtagttttagcaacataccagaaataatgaccatattgaacatcagcaaaatgccatggtttgaagaaaagattgtagtgcacgatcttaggatcttgaatttcaggaatgctttcatttggcatagcatcccattctttaggtaggtgataaatcttatcttcgcaaatttcattcatgtaggcttgatcagggtcaacgttatcgaaatgatatttattcattaagtaatagaatttatcaacaaactttttgtctctaaaggccttcatattaaacagaattacaccattattgatgtatttttctgcaggaaaaattccctgacattctttaatgtacttttgtaaaagtggcatgtaacgaattgataagtcgggacatgaagcaaacatgttgtcggcgatatcaatttcatacattttagcaatatcagtacagataatagtatctgcatcaagataaactgccttgtcatattgagggaacaattctggaatgaatagtcggtaaaaaattgacatagtaaagaattgagcacgcaagtagttttccttagtattgtgaattggcttaaccatgtcatcgtcaatatgaaagatttgaacatgaatattatcagttgaaagatcttctaagctctttttgtgctcatcagatatctgttggactaaaagggtaatcgtatagtccttcttggggtcagtatggtcaattaatgatttaattgaaacatatgcatatggcgtataattatcgctaattgtgtaaaaaacaggaatggttttcaaaataagatcctcctaaattatttttttaaattatttcgtaatttgagatattcgttaagcaaatcatcatattcatgtaaatgaagtacactgtgtacgcgatcaacatcccatggcttaactgtttgagtatggaaataaggccaaaacctaaagctagtagtgaaatgttgaattttggtgtttttttgcaaatgatattgctcattataacggcgtggtgctactcgcttggctacagctagcttgtttattgctgattggtcgggcaaaaacatttgcttaacctgcatcatatgccgcacctcggcaaagagatcagtttgcttaattttcttcatattcagcaacaaaacgccagaattaagataatcaaatgcgcgcttggtcttaagattgtggaagaagaagcggccccaataatcaagtacgcccactaattcgattccggtaatatcctcattgtaaaaagttgtaatatcaccgcgaatgacaatgtcatcgtctaaataaagaatgcgatcaggaatctgtggcaattggtctgcaaataaacgcaacatagcatatggcgtgaagcgagtattcatgttagcggttggcggttcctgttcaaataacttggtgcagtcaattaattcaactgtactgttaggattggctttttttactaaagaacgtaaaaaatcagccgcatgttgtgagaaagggtgatatttacgttcatcactgtgtgcctccatcgttaaaatataaagatgcaattcttgagcaccagaatttttgattaaagataaggtggaaatcaaaacgccatcttgagcattttcatctccacaaaaaagaatattcatgataaactcctattttttatttcttttgaatatattgacaatattcataatcgctattttttgcacgctgcttcattacctgccaaatttcatcgtgaagcttattttgagcttccttacggcttaaatttgtatccgggtaaaagggcccatcaatgtaaataacggcactaggccgcttgctaagccactttttatggtaggttttggtcatgacgaaactaggcgcatttaatttaactggaaagtgcatgcttgttgcatcgaacgggcgaatcttcgtgtaatagggccagacatgagcttcagggtagatgagaatctcgccctttttatccttaatcacagtttgaatggctttaattagtttgagcgattgcttcatatttttgccaacaggcagaccgccgtagcgtacaagatatttgccaatgaaggggatgccccagttagcttgattagcaatagcataaaaatttttgattggaaaaattgtgagcgaggtaaagacatcccccatgggtctagtatggttgccataaataaaatagcccccattgacttgcttaagtttttcttgaccaacgacttttacatgatcgaagaagcggaaaaccacccaaccaaaagcgcatgctaagtgacaagcggtagtggaccagattctagctccaagagaattaggtagaataacgtaattatcgggtagactgaaattttgatcgtgactatcgactacatcatcggttgttttttggtaataataaatccgtttcatcttgccctccatgatacttatgtatcctatgataccatggaaaaaagcctaattcctaagacgagaggaatgctgaaagaaaataaaaaagattcgtaatttcatgatcgaaaaatacgaatcctctgtaaaatagcataaaaaaagcaccgccttcttgcagtgcatctttcatattatgggtggccaggggatcgaaccctggacccacggattaagagtccgttgctctgccagctgagctagccacccatatttgttcatcagctcccgccgacatttaaatatattaccagtagttttataatttgacaagctttttttgaaaaaagttgaaaaataatttgaagctagcaaaaagcgcccataatggccgcttttttactaaagtttatcttgaatatgataggctgtgccttgctgatcctgcttcatgtgatctgcatagtaaacagcatagacaccgctttgatcatttttggcaatcacaatttggcgccctgttggacgttctgccttaatgatttgagcactgcggcgtgcttctttaaagtcgtgtgaagatgcgatggcatcccctggattaaaaaatacagcttcgttcattgtaaagccccctcgtacaaattctaattttattttaccaataaagccctttctaaatccaatttaagaaacaaaaaagagataagatcaacatcttatctcttacgaaaaatattatgggtggccaggggatcgaaccctggacccacggattaagagtccgttgctctgccagctgagctagccacccatgtcgttgaatcaatcaacagatattattatgctattgttgataagaaaatgcaagctttttttgaaaaaaaacaaaaatttttggctaatgttacaaaattcagtataatgtaagggcaaaggaggcattcccgatgccaaagaagattctcgtcgtcgacgatgaaaagccgatttctgatattatcaaatttaatttaactaaggaaggctttgatgtcgacaccgcctatgatggcgaagaagctgttaaaaaagttgacgaatacgacccggatctaatgattctggatttgatgttgcccaaaaaagatgggttggaagttgcgcgtgaagttcgtcaaacgcatgacatgccaattatcatggtaactgctaaagatactgaaattgataaagtcttaggactggaaatgggtgcagatgactacgtaaccaagccgttttctaaccgggaattagttgcccgtgtgaaggctaacctgcgtcgtcgtgatattgttaaaaaagcagaagctgccagccaagaagagaccgataagaatattaagatcggtaacttggtcattatgccagatgcctatattgtagaaaaaaatggtaagaagattgaacttactcaccgtgaatttgaacttctttactatttagctcaacatatgggacaagttatgactcgtgaacacctgcttcagactgtttggggttatgactacttcggtgatgtgcggactgtagacgtaacggtgcaccgtttaagagaaaagattgaagataatccaatccaacctcaaattttagttacccgtcgtggtgttggctattatgtaaaacagccgagtgaagaataataaagaaagccacagaactgttatggtagtggctttcttttttatattttttagatattgaatgagtagaatgaaaaaattcaaagcaagattaaatagtacatttaattccattaatactaaaattgcaattgtgttcatgctgatgctactggcaacaattgaagttattggagcttattttacccgtcaattagagcaaaatagcattgaaaatttccaatcatcaatccagattcagactatcgtcagcaatcagttagctaatcagttgaccagtgataataaaaatactaatgatcgcttgaatcaaattgttaatgactacaataatgatgcaattagtgaaattattgttgtcgataataaggatacgattcgtgccgtttctaacttaaatgataaaagtaagatcggtcaacggattaacaatactgatgtgaagcaggttatttcaactggacatcaaattaataaagtggtcgatgatcatggcaattacatgattcaaatatcgccgttgactagtggcaatggctctaacaatactgttggtgctgtctatgttaaagctagtatgcaagatgtctttaacaatttgcgccaaatttcattgactttcttgattgcgtcattgatcgcggctttattaggtgcatttttgtcattagttatttcccgggcaattacgcaaccgatcgaagaaatgcagaaacaagcattgcatattgctgatggtgattattcaagtcaggtaaaaatttattccaatgatgaactagggcaattagctaaagcatttaataccctgtccgtacgaattgaacgctcacaagaagagtctgatagtgaacggcggcgactagatagtgttctgtcacacatgagcgatggagttctagccactgatcgtcatggtaacgtcagtgtggttaatcatatggcactaaactttttaaataaaaaagaagacgaggttatcaataagccgattgctgaagtactgggactagaagatacttcgtcacaagatttgatttctagtcaaaaagagatcgttattacccttgatccaggtacgcgggatgaaattattttgcatgctagtttttctttgattaagcgggtaactggctttgtatcagggtcagtttgtgtattacacgatgtaactgagcaacaaaagaatgaagattcacaaagacagtttgtttctaatgtctcacacgaattgagaacacctttaacaagtttgcaggcttatattgaagctcttaatgagggtgcttggaagaatccagagattgctcctaagtttttggaagttacccaacaagaaactagtcggatgattagaatgatcaatgacttgttgagtttgtctagaatggaccgtggcgtttcaaaaatggatctagaatttgttaacttaaacgattttgttaaccatattcttaaccgtttcgatatgattgttaaaacagataaaaataaagaaaagaagaaatacacaattaagcgtgaattaggcagtcaagccttatgggtggaaatcgataccgataagatgatgcaggtaattgataacattatgaacaatgcaattaagtattcacctgatggcggtgtaattactgttagaatgacccaaaaccaaaatcatgttatcttaagtatttctgaccagggcttgggtattccaagaaaagatctgggtaaaatctttgaccgcttttaccgagttgataaggcacgttcccgggcccaaggtggtaccggcttgggcttggccattgctaaagaaattgtggaagctcaccatggtaaaatttgggctgacagtagcgaaggcaaggggtctactttctatatttccttgccatatgaaccgatgacagaggaggatgattgggatgaagtttaaattcaaattcggtgaatttttcttaggcttagctacactgatcgtcattgtcctctcaattgtgctttggatctttattatgactagtgatcagcgctttagtaatattggtcagcaaaatcaaaataatatcactaaagagcaaacgcgtagtcacaattttaagtcattatatgatttatatattccaactacttcatatggttttgctaatggaaatttgtgtcagctatatgattcaaaaaataatttgactttagaatttaccaaagagataaaaaaagccaaggccactaataaaattaagaaaatagttgatactagaactaaatatgaagagtatttaaacaatcccaactatgtgcagttggtttatccagatgaaattactttctccttatttaaccagttgaataatgccgcaaatgataaccgcgagtttaaccgcttctttatctcgcagtcaaatcactggatttatttgggaaatgatcagactaatgaaatttatcaagtaaaaattgctggcgcaaattttgataaactacgtaaatatgcatgtaatgctaagagcaagtatccagttagattagttcgtttaaaggaaggctattcaccgttttacatcaagacaatgaatgctaaagtttatagttacttgactaatcatcaatcgtattcttactttgtttcgcgtttattaggtacatctggcgttactagtaagactaataagaatggtcaaacggtatattctttgaactactatactcgcttaagagtgccagattctaattcaggtgagcataattatctttatactcattatgaaaaaaataagatccccaatactactaaccgcttattagatagcgtttattatgttcaccaattgggtttaaccgagcaagatttacgcttctttgatgcagatggtgctaatgttagttatctaaactatattgaagggattcctgttttcttaaataagcatgatttgcaagtcaagacgaccttttcaacagattcgattaatgtggcctttaatagtgtaaacttccaaattccaattccgtttgatggtcaaactaagcggttaaaaccaacccaagatgttgttgatgaattagtcaatcacggcctaaagcaggaagatattcaacgaattatcgttggttttgctgaagaaaaggattcaagtcaccatagtttgattaacttgatcccaacgtactatatcaaagcctacgatgaatggaagagcctaggtgaatgggaaaagcaagacgtatctacctaccgtgaagctgatcagttaactgttaacgaagggggaaaatagaaatggaccataaacgaatcgaatggctatttttcgttgttttctttttaattgatatttatcttggaatcgaaattctccgttctcccgttaatttaagtaacgctgataccactactcgtagtgttgctagcatccgcaatgaaatgaagtcagacaatattgatttgcccgataagatttcggatgcaccagattctggttattatttagctaccaagaatcgtgactatctctctggcaaagttagctcgctgactaatgtaaatgcccgctattctaaaagcgataatgtgctttatggtgaaccaagacaagcagtccttttgagtaaaaaacctaaggaagctttagaacaaattgaagattttaagaatgattcgaaaaatattccttatggtaaagaattcaagtatgaacctgatatgtcgagtgaagacaattatgtttttgtgcaaaactcagattatggtgaaatttatgctaactcggcccaattgaatatcaatgtaaaagataatcagattattaattttactgaaacatatatggggcaagctagtccagtgcgtgaattacagtcaaccatcagtgcttggcgtgctgtgcgtgcgatgtacactgatcgtgagttgactaataattcgcgcgtaacgcaggtaaaattaggttactccaaactgacagaagtacgtggcagcacaatcttgttgccaacttggctggtttgggtagaaaataagacaactaaaaatatcacgatgaaacgtattaatgcatatacggcacagatgctacaatcgagtacctataatgtagaaaagtagaagggacaaaaattgaaggtttccgttttagcaagcggctcgaccggcaataccagtttaatcgttacaggccagcataaaatcctgatggatgctggcatttctggtaagaaaactaaagatttgctagccgaagttggagttgatattaacgagattgatatggcctttttaagtcatgatcataccgatcatagtggcggactcggcgtgttgatgcgccgttatcctaagatagatgcttttgccaatagtgggacttggcagtatttattggatacgaaaaaaataggtaaattaccggctgaacaaatgaatacaattgaaccaggccaaactaaaacttttggtgatgttgatattactgcctttgcaactagtcatgacgcagctgagccgcaatattatgtgtttactagtggtggtaagcgggtcgcttttttaactgatacaggttatgtatcagaagaagttgaagggacaattgaagatgctgatgcctatatgatggaatttaattatgataatatgatgctcagagatggaccatattcctgggcactgaagcagcgaattttgtcggatgtaggccatttatctaatgacgaagcagcccaggcattagttgatgtagtcacacctaaaacaaagcatatctttttagcgcatcgcagccaacataataatacggagtatttagctcacgaaacggcaaaggaaatgctgcttgagggggatgcgaatttggatgatgatgttaagattattgatacagaacctaatcagcctacaaaattagttgaaatttagcagttttcacaacattttttcatataatattcaaatttaatcggtatgattagtaaacaagatgaggggagaagcaagcatggtagaaaatcaaaataataataacaatttacaacaacctagaaaaaagaatactaatggtaaaatcattgccactgcagcgattgtcggtgtagttggtggcttgatcggtggaggcgtttcatattacgcagctgatcaaatgaataatgcatcagttaataatggtgccgctcaaactagtgtatcttcaagtagtagtaaagtttcagaaaagagtgctaagactagtggcacaatgactactgcatataatgatgtaaaaggagcggttgtttcagttattaacttaaaacgccaatcaagttctaatagtactaattcactttataatagtttattcggtaatgatgacagtgatgatagctattcatcaagcagcaagggcaagcttgagacttacagtgaaggctcaggtgtagtctacatgaaatctaatggcaagggctatatcgttactaacaaccacgttatctcaggcagtgatgctgttcaggtaatgctagctaatggcaagacagtaaatgctaaagttgttggtaaggatagtacaactgacttagctgtgctttcaattgatgctaagtatgtgactaagacggccgaatttggcgattctaagagcttacaagctggtcaaactgtcattgccgttggttcaccattaggtagtgaatatgcttctacggtaacgcaagggattatttcagcaccggctagaaccatttctacttcatcaggcaatcaacaaacggttattcaaactgatgccgcaattaacccaggtaactcaggtggtgccttggttaactcagctggtcaagtgatcgggattaactcaatgaagttagcccaatcaagtgatggtacttctgtcgaaggaatgggctttgcaattccatcaaacgaagtagttacgattgtgaacgaattagttaagaagggtaagattacccgtccacaacttggcgtaagggtaatcgcacttcaaggtattccagaaggctacagaagccgcttgaagataaattctactttgaagagtggtatttacattgcctcagtaaacaagaatagttcagctgctaatgccggaatgaagagcggcgacgttattaccaaggttgacggcaagaagattgatgatgtggcatcgttacacagcattttatacagccataaagtcggtgataccgtaaatgttaccgtgaacagaaatggtaaggatgtcaacttaaaggtaaaacttgagggtaactaaaaatcaaaatagaagttaattaaaagaaaaaaggctatatcacgcggtttaaacgtagatatagcctttttgttaactttttaaatgtgtaacatcaaattgttcggaattatttgttgtcaaacagacactagcctgttgataagtgtggataactctgtggattgtgtataacttgataaatataggtttattaacttgtggaaaaatatgatgattttgaccttatttagtgaattctatttgagaaaacaggcgttcatgcaggcataacaagccttaagagataaagtttgtgaaaaaaggctttcataaaatcgatgtgaataaagaaattttagaaaaattattaaatacaacttctggggtataagtaaaataataccacaaaatgttgaaattggtctttgaagttttgtggaaaagtttgggtaaatagtgtggaagggatgttagtattgtgctggtagattaaaattatgaatggaaaattagctatgcttgttataatagaagcatgaatatcaaaattgtatgtgttggaaaattaaaagagaagtattttagggatgcaattgcggagtatgagaaacgactcagtcgttttgcaaaggtgtccattgtacaggtgcctgatgaaaaagcaccggaaaaattcagtgcagctgaagatgagaaggttaaagagattgaaggtcagcgaatcctgagcaaaattaaagataaggagtacgtgtatgtgactgcaattaaaggaaagcagcgcagcagcgaagagttcgctaaagagattcaggatctcgcaacttatggtcattcagacattacgtttgtcattggtggcagtttagggactagcgatgctgtaaacaagaggggaaatgacttgattagttttggtaaattgacgatgccacaccagttgatgcgcgtggtgttgattgaacaaatctatcgtgcatttatgattaactcaggtagtccttatcataagtagaatatagaaaaagcccataaattgggctttttatttttgcatatttgcagatttcacaagcatattgaaaaaaactgtggcaggtcagtgcttttttagttttttatgatttaaaaatagattttgttaaattatgtttggcaacaaaaaagacgatctttcgatcgccctgataatttttgagctaccagctagtagctcacgcacacgctgaagtgtactttatctttgtagtatctcaattttaacacataaatggtaaaattaaaactgcacgctgaagggggtaagtgtcaatgtttttgcggtagcctttaaaccattagtctaaccttaatttcttaaatatttatatgacttaaatttctgcttagcttgcttaaataactattgccagctacctgtgcggttaatgcgccatgctggatgcctaaatgaacttcatgacgcttctttaagctgtcacgggccgctgcttttaattcctgttcagtcaatacagttatttctgaatcttcaaactcgctgctaagccaaaattccagctctcgattcttgatgcagcttaagatcctaagcatgccttctgctccagattttgaccatttcttgccttgccccttaacacggtaggtatacttgcggtggttgctctcgcagcagccaatggctttagtcacagtcagttttcgtttcttaaacggcttaatatcgtcccaatgacgatcaatataattccttaggcgccccagataatcatgattgagctcggtattcaattcatcaattagtcggctttctgcagtggttaggatagttttaactttgtcatagctgtatttgtattccaaagcagaaatcagcttgccttgcaggtcaggcgcaaaatatagcctttctttgattttcttatttaggtgaaagacatccaagaaatgctcatgacgcttgcatagccctacaatgtcatcgaagtctgttttggcatatccagcaccgccatcggcgttgctaagaattacagtatcagaaagatcataagtattggccaggtactccttggcttcgttcagcgcatcaagtcggcttaaagaaacaaattccttggcattgattcactttctgcgtttcttgcttatattgacaatgccttcacagacctgatagcgatgaaattccaaccggcttttagtgcctttgatcaccacgccatcgccttcaagatacaaaactgggacctttttcttagtgcctgcggcatcatatcttgaatctgcttcttggcccgctttaatatttttcccggccatttttaccaaattgcccacctgcatatggctaatattaaagccagacaggcaattgactgctagagcagtattgcgataagtggcaacgctgcttacttctaagatgtttttgactgctaaaatactgtagcgcttgtatttgtcaaagcccattaattcatccaagggataccttgcttgtttgcctgggcagacatatcttcttctgacatacctaacttcgccaaaagccatattgattgagcgctcattcttcttatcaatctgatagccctgtgctttaaccttggtaatcatttcatcatcaactttagctaaagccaaggccatgatttccttaatcaggtttaagaagaaacagattatttttctttcacgcttaatataattatcttcagactttataatatttgcgatttcagttacaattgaattcataaaagaccagcttctaatgtgttttttgttcttaacatcagactactggtctttttgtttgagctcaagtccaaattcaaaggacttgggcttttttaattatttattcaacttaccgtaaaaaattatacacttagctgaaggggtagcgcccttactcgtgtggaaggaggtagactcaatacagccgtccttcggggcggctttttttatgatgaaaatggcaagtcattgggtgaaaagtattacgcatatcgtgcagtaactgtaaatcaaagtcccataacaattaatggcgctaaattctacaagttggctgatagggatgcttatattaaggtgaccaatattagtggtcaaggtcgcgttttaaagcgtaacgcctacatctacagtacatcaaaaaaaacgcactacgcataacggtgcttggaagttgtacaaaggctccacagtgacaacttacggtggttcatacaagtttaagaatggcaaacgctattacagaattggcggacctgctaagcaatatgtaagaacatcaaactttaattagaagttgaatatcatttacgacagcaacataatagttgctgtttttttgcctcaaaaaccatagaaaatcttctgtaatcaaggtaaaatgaaattgattttacaaatatcatggaggatgttggaatgagaaaacgatggacagcagctgttattgctgctttagttgccgtaagtactgccgcaactactgttaaggctgacgatactaacacaacagctaatactaatgagacgcaagtaactgcaactagtgaccaaactaattctgattcagataaggttacttataacaaggcagattatttgtctgctaaccctaaattagtgcgaattaagcatgcaactactgcttataaggatgctgcattgactaaatcagcacagagcgtaaaagcaggatcacactttttaattagtcgaattgttaaatctgacaaccaagtaccaatactaaagactagtgatggcttgtatttgcctgctaaaaaatctttggtaactaaggtcatagcctaccaaaatcctaagggttatcatcaagtacattacacacaagttaaaccatacggtaaggtgggttataacttgtaccgtggctatgagggtattaagacttggaaagtaatgcatagagttggtacttgggcaggtacgaattactataaccaagctacttataacgcagtaaagaacttccaacgtagtcaccacttgccagcaactggtaatgttaacttagctacttgggaaaagatgggcttttctaagaagtcatggtatagcattgatagttatgttgccccacttaaggcttatgcttggcaagggcgtaaagctcatattgaagcaatgattaatcaagcttacaaatatatgggaaaaccatggttagcaggttgttcaactagtccaagctacggtgttgattgttctggtttggtaatgcaaggtctttatgcaggtggcattagtccagttccaactagttcaatcggccacgctcatccaggcaatgaatggaattcacgtaatctttgggctgacaagcacctaaagcgtgttccatattcacaaagacaatgtggagacttagtgttctattaccaaccaggtacgcacactatttggcatgttgcgatttacttaggcaataaccgggtaattgaaagctggccaccacgtgtgatggttcaaccaattgttaattcacaaagaaatgtaattgctggtattaagcgaccatttatttaaggaaaaatatgaaaaaatacttagctattttattagtcagcctgggctttagttcattattgttaactcgccaaacagtacatgccgctgataatgatgatgccgcgacaactaatcaatcggctcctaagtatactggccttaaaaaagttggtaaacattatgtctattttgatcaagcaggcaagcaacgttttaaaaataccaagactaaaaaagcatattattggattaataaaagcggcaagatagttggtattaataactacgccaaggtaattagccaactacctgaaatgccaactggttgtgaaattactgccgtgacaatgatgattaattttgctggtaaaaaggtaactaaacagcaggcggccaagattatgccgcgcagctctaaccctaacaagggctttatcggttcgccttacaagaaatatccgctcggctattgggttgctcctaatggggtgaaaccagtagtgaagcattatcttggtagagcacagaatatgattaattgtggtttgcccgcaattaaggataagctgattaattcacacttggtggttgtttgggtagggatgtttgacggcctctctaaccatgctattaccttgacgggttaccatggtaaaacgatctattataatgatccttggactggaaccaagcggaaaatcaagcaggaaatttttgcaacgcattgggctttagatgctcatcgggcgttgagttattaattttatgtaaatatatttactttttagtcatgttgatcaagccactttcgcagcatttcaacatattcatctgttttttctacaaaagacatgtgaccgcagttttcaaatagctgccatttactgccagcaagctgatcctgcatcgttttagctacataaggtgtacataaatcatcagtcccactcgtaattagagttgggatttttattttgcctagtttttctgtgtattcgtaatcgtgcaagttgccctctggcgtatattcatttggtccccaggcggtttcataagctacaataccaccacatttttttcgcataacgcattcaggccacgttttcgtcatgtcaattgcatgttgattcatgaagtgctcattagcttttaagtaatcaggatcgttaaaattgctagtcaattcggcgcgatgaattgccgcctgttcttcaattggcaagtatttaatcatccggtgtaattctttgctccataaggaagcagacgacaaggttgaagacaagatcaagctttgaatgccaacaggatgataatcacacatgtagattagcgctagcatcccaccccaactttgtcctaataaatgtattttgcgcaaagccaagtgctcccgcaacgccatgagttccttaacccatgtttctttagtataaagttcagggtgatcatcagggatgctactcttgccgcagcctaactggtcgtacatgataatccgtcggttatcaatttcggctaatttgtccaaaacctcaaaataattatgacttgagccgggaccaccatgtagcaatacgagtggtgtcttttcgcttcttcgaccaacaatacgatagtaagtttcatagcccatgaaaggcatttttccttcgataatttccattttttcacctatttgaacaaaaacaatgagatattaaccaaaattagcagggtaaagaagattacccaatctctagctggtaaaggaatagcgatgatcgtcgaccttctttgcccttcgacatagccatgtgattccattccttgggccagattgtcagctgaatttaaagcaacaagaattgctttaaaatagaggaccggcgaccaaaaactgagataaatgccccgcatcatagcgctagttcggatctgtttaaccgccatcttcatctgcggaataatgttaatcgccgccagcacgccgtaggcaaatttactgggtaagtgcaggttctgctctaatgatcgggcaaagtctgtagcggtgttattacgtgtcacgcaggcaatcgtcaaggtataaacatagatacgcgttgacaaattccaagcataataagcatttggtgttggtgaaaaccaaaagagcgttgcaaagattgtaaaagcagcaataaagggcaagataatgagcaagattaactctttgattttgaatcgagtaataattaaataaactagcgcgaaggtgattactaacaaattagtaactaagctagcttttaaagatatttccagggaaataataaatgctaaaagaaattttaaactaggattcataagcttatctttctacatattttaagcgctgatccgcaaaaatcaggtggtaatcgcaaaattcagctagctcgtctatctgatggctaatgataaaaaacgtctggtggagcttttgctggctttctcgcattaattctaaaacgagtttgaccgagttatggtcaagtccactgagcggttcatcaattaataaaacctgatgcttagtcattagcattaatagaatctgtaatttcttctgttggccacctgagagagaataaacaacttggtctaagtgtttggctaaacccaatttatctagccattcattgaccttttcttcagtaaaaaataaatttctatcctttttacttaattctagttcatctttgacagtcacagctaaaaattggtcgcttgctttttgaaaaatttgagctacttgtgttaaatattttctagctgagatttgagcgatttccttatttaaataagcaaaattaccagtatacggaatcattttggtcattactttaaataaagacgtcttgccaacaccattagcaccagtaattagggtagtgccagaatgcaaatttagctcattttgcttaagcaaaagcttgttttgtctaatttggacttgttttaaagtgaaaataggctcactattaggtaagacaaaatgataatgtcgctcatgcaattttttattttgttcaaataaggctatttttttgctagcatttaattcaataacttcttgattatttgtaaactcaaaaagatggtcgcagacaggttcataatcgtctaaaacgtggtcacttaaaataatagtttttccgttgtgagctaaaatcgctaattttttaatcaaaaaagcacgtgtcttaggatcacaactggcaaacggttcatctaagagcaataaatctacatccatagctattaagacagctaaagcaactctttgttgctgaccgcctgatagagtattaatcttttgatcgagaaggtctgcaatttgggtgaaagctgttgcctgatctagtcgtgtttgatactcaccttcatctaactgtaaattttctaaagcaaagacaatttcttcacgtggagttggcattgtaaactgttcagccgcattttggaacatcattgccgccttttgtccgtgcaggtccaccatacctgttagtcgccctgcatatttgggatacaaaccagcgataattttgagtaaggtagatttaccgcagccggtcggtccaattaacagagaaaaaccatggggaatttcaatatttagatgattgataataggttctttttcataagaaaaagtaagattgttaacggttactttcataagcttgattgtacaagatgctttggggactgtctacaggtagagtttgttataagtagaacaaatcataaataatacttaatactaaataaagttttgatttataatgtaattatagtgttaccatattttatttaatttaaggaaggtggacatatggcagctgttgctttggaccaatatctggcaagtgtattaaagtcaaattcaacagataagaatgaaataaagttggaagctggtaatccagattttgatctgtttactatctaccttgaaaatcataatactggtattcatcgctatcggatggatgtttcaacgattttatatattgctaagggtactgtgacaattaagagtggtgaaaagatcattcaaatgaagtctgggaatgttttgctactgactgaaggttgcaagtatgagattttaagtcaaaaacctgatacggtactgataaagttgaagtttaagcgtggatttctatatcgcaagtattttaaagattttagctgtaagggagaacgtgaggttaaagttattgagcaaatcgttgatagcttagaaaatgaacatgttctttggctaaaaaataatcaaattactcgtgcttctcaagtgatgcaacatattattggcggttatttgaataatgatttgtttactaaagctttaattcaggctgagttgaccactatgttgattatttcaattagaactcagcgcatggcaacaccgactagtttggataaaactaagtttgaaaagaagaccttagataattacatcgatcttcattttgccgatgtctctttatctgacgctgcaaaatactttggcttcaatcctaattatttctctaatatggttaaggctaagactggcaagagttttgtggatcacgtggatgatcgaagaatgcaagaagcgcgtgaattgctggctcagcctgatatttcacttagagagattattggtcgagtcggatattcgagtaagtctttcttttataagaaatttaatcaatactaccacataacaccagcagcgatgcgggcagaattgtttagacaagcaaatatcaatttaaagtaaaaaaataatctggacgaaagttccagattattttttacatattttctaagcgtttaatgcggtctgctgttggtgggtgagtatcaaacaagtgcgtcaaaccgtgattgtggaatggattttcaatatataatccagcactactactatcagctactttcattggttggctattttcaatcttgcgtaaggcagaaattaagccttgcggattacgtgttaatttaactgaagatgcatcagctaggtattcacggttacgcgataaagccatttgggctagggatgcagaaagtgggcctaagatcaacacaaagaccaaggcaaccactttaaaaattatggctaaagcattactgtcacggtcatcgtcgtcatcactgcgcacgccgccccagaaccaaaaattggacgccatattagagataaaagaaatgaccccaactaataccacggcaattgttgaaagtaaaatatcgtagtttttcacgtgtgataattcatgccctaagacgccttcgagttcttcacgatcaagtaattctaaaattccttgagtaactgccaccgcactatgttcagggtcccgaccagttgcaaaagcattgggactaggatcaggaataatatagacccgtggcattggaacctgtgccaccatcgccatatcttctacgatatgccacagttccggattgtcggcttcatgaatttcttgcgcgtgattcaagctcataatcatgttggctggattttgccacatgatgaataagtagactaaactaccgatcaaagcaatagtaacgcccattgttggactattgctccaaagataaccgattcccgcaccaactaagcctaagatcaccaaaaagatgaacataattaacgccgttttgcgtttattacgagcaatttgttggtaaagcatggttaaacttccttaaaattaaaacttaacttgaggcacattcttttcttcactaggagtttctaagtagttaatcttagtaaagtggtgccacttggcaacaatatttgatgggaaagtaagcaacttttgatcatatgttgctacagttgaattataaagttgacgagagtaagcgatcttgttttcagtgttagtcaattcttcttgcaattttaagaagttttgattagctttcaagtctgggtaggcttcagccaaagcaaaaattgacttcagagaatcagtaatttggttagaaagcttcatcgcttcttcatggttaccttgaggcacattaaccaattgattacgtaatttgactacttcctcaaaagttgatttttcatgcttggcatagcctttggtggtttcaaccaagttgggaattaagtcattccggcgcttaagttgaacgtcaatttgactccaagcttcttcagcatagactttcgctctttgtaaaccgttgtaagttactatgtagatagccacgattaaaacaataatagctaaaatgatccaaattaaaggtgacatagtttttcctccataaaatatttatttaattttatcgttttcgaatttcttgagcaataaaaaagaatgtcaaagcggcattcttaacaaaaaatattaaattctgaagattaatagtaataatccaactgcagttaaaataatcaaaccagcaaattgcataatagtccattgaataaaaaactttttcttacttacgctaccgtgttggttgaaagtcttaagaactaacatattagccattgaaccgatagcggaaccaaaaccaccaatgtttgaacccaagaataatgcttgagcataagtggtaaatttaccaactaaaatggttgatggtacattgctcattacctgactagagataattgaagcaaagtaagttgaaatttcagaataaacggtgccatgaattagatttacgataagagggatttgttggatatcgctgatgaagatgaagaagccggtaaaggtaagaagtaaggcatagtcgattttgagcataatcctaggattaattgcaagggctaatgcaaccgacgttagcatttgccaaataatatcaatggttctgaaaacaccaaagaagaagaaaataaagacagcagtagttatcagcgtcgggcgccagctgatcttgattggctcagctttttgcaccggaatttcttctttaggaataaacagaaagactaatcccatgattagcattgaaactactagataaggtacagaccattcgaaaaattttaatgggctgacatcaaagcggctgactgagaaaatattgtgggggttgccccaaggcgtaaatgctgccccaatatttgcgcccatcccaatcaaggtaacaggcaaaatctgtggcaatttataacgcttagcaatatttaaatacagtgggatcaaggtcaatgcagtaatgtcattacctaaaaacatccccgaaatgacagccaacaacgaaaacagcgtgttcaacttacgcgtattatcggcaatacttgtaagcttgtacgctaaaacatccagaacatgcaagtatgcatagatctggataatcgttaacatcgcggcaacagaccataatgtatggaagttaatgtccgcaaaccgcggtctggcaaaaaaagactgactactgtaatgatcacagtaatctgtaaaattctatctttagcaatattctttaagacggtcataaaaggtcccccttacgtattacaatcgtctaaaaaccctatgtaccattttgagcctttttgttattgcatgcaatgataaatttaaaaaaatatcaagattagcggtatttttgagcatatttttagttagttggaactagtcgtgctatacttaaataagtaagttaataaaatttagattgaaacgaggaaacaaaatgacagagaatgcaatttcaatcaatattaaaccagatgctgcagaaatgattaaaagcaagatggatgcagatcaccaaattgttatcttggctttagatgatggttcaaccaagtattctaaaaaaggcggcacttgtactattggcgacagcttccagtttgtaatccttgctgaaaaagatcctaagtataatatttcaatcgaaaataatgctggtcttgacttgtatactgctcagccggaaacaactttctttgaaccaggtctagtggtaaatgcacgcaactcaactttgagtttatcttcagacagcggcattattgatggtgggatgaccgttacccaatatgaacctgaagcaattactgctgatgatctaaaaaacggcggtcaatgttaaaaaaataaaattaatcatagggacgagggaatgacctcgtccttttttagtatagaattaagaaagtgatttcaatgtaaggggggaagaacaatgacttttgtcaaagaaataaaagcaggtagtcgtgaattttgccaaaattggctgcggtatctgctactttttatgggattaagtttatttaatcaatttattgttattccactttttcgctatattacaacctttgttttgcaggctagtgctattccgttcgtatcttatcgaaatgtagtgacgatcattacgacgcatacggttgcctttttaattttgataattgagttgctgcttttattagtaatcttgtatgcgcaattagcttatttacttcatggcgtttgggatattaagcatcaagtttttacgtggaaaaatagttttattcaaacttggcaaaatatcaaaaaaattcgtttgggcacgctttttattttgatgctctattttttattggtagtaccgttagccgatgtcatctttagaacaccacttttaagcaaagtgcagatttcagaatttatcttggattatctgacgagaacgccaatcttgttagccgttttgattgcgttttatttagccgctttgatccttggtgcaaggctagtatttgctttacccatcatcgtttttgaccacttaaagtcagtgcaagcagtaaaaagaagttggcgattaacggcgcactaccgttggcggacgatttgctggaggattattgttttagccgttttatctgcagcagtcatgacaattttctatttagcaatgtattgcctgcagctattagttgatttattacctgggaaatgtccgttaattttagccattagcaatctttcgcttgttcaaattattagtgaagtagcgttagtctatgttagtgtactgggcttatctattattttgaaagctttaaggcaagaaaagataagtcaaacaggtaaaactaaaaagataattctaagtacattagttgtgtttgtactagtaatgattaatgcaatatctaccaattatttatatttgactagtgtaaatgctaaagcgccagtaattatttctcatcgcggcgttgatgataaaaatggcgtacaaaacacgttacagtcattaagaaaaacggctaaagaaaagccaaactacgttgaaattgatgttcatgaaactaaggataaaaaatttatcgtaattcatgatgagaatttattgaagctaacgggagttaataaagccccgaatgatttaactttacggcaattagaaaagttaactgccaaagaagacggctatcatgctaagttagttagctttgatcaatatcttgaggaagccaaaagactgcatcaaaaattgctaattgaaattaaaacgacggctaaagattcgaagaaaatgctgcagcgctttaatcaaaaatatggcaaaacgattcttaaaaatgcgtatcaagtacaatcactcgactatcgcgtggttgaaggactgcacttaattaatccacgtttggttgtcttttacattcaaccttataattttacttatccgcaaagtgttgctagtggatattcaatggaatattctaccttgaattcagactttatttggcaagcccatttgcaggatcgtcctgtttatgcctggacagttaatgacgaaaaattaatgaagaagatgatgtatcaacaagttgatggcttaattactgatcgagttgatttagctaaaaaggcaattaaaagtttccaaaaggatgctagttatgctacgcgaatcttaaattatattgttgtcctgcatctgtcgaaaaattttgaatctgcatgaagacttgatctgaagggctggacatggtaaactatactagattttcgaaaatctgaaaggaagtatagcatatgcgtaaaggtgaaaattacaacactggttgtgaaccaaatcaaagacctaagaacaagagaaacgcaaagaagcgtgttgctcacgtagcagcagttgttgctttcttgaacaaggccgcaaaagacgaaaacaagtagtctttaataatattgaaataaaagctaggagctgacgcttctagctttttttgtgcttactgaaaaaattaattctaagtgtataattttttacggtaagttgaataaataattaaaaaagcccaagtcctttgaatttggacttgagctcaaacaaaaagaccagtagtctgatgttaagaacaaaaaacacattagaagctggtcttttatgaattcaattgtaactgaaatcgcaaatattataaagtctgaagataattatattaagcgtgaaagaaaaataatctgtttcttcttaaacctgattaaggaaatcatggccttggctttagctaaagttgatgatgaaatgattaccaaggttaaagcacagcaagctcttagttaaaatcacgccacttaagcgttacccaaaagttacgttagttgtaccagctcataatgaagaattagttattagtaaaactacgcaggcaattttaaatttgaattatccggctgataagttacaaattttaatctatgctgataattgtactgatgatactgctaaaattgcccgggaaataatcaagcaatatcctgaacggaaaatcaatgttcaagtaattgaacgaacaggtagtggtggcaaagctggtgtattaaatgatgctttgaagattgcccaaggagaataccttggtgtatatgatgcagatgccatgccagaagaaaatgctttgtattttttaattaaaaagattttggaaaatccggtgagatataaggctacttttggtcgcaataagacgagaaatgcgcggcagaattttttaactaagtgtatcaatcaggaaattgttgttacccagcgaattcaacactgcggtatctggcaattatttaagattggtcgtattccagggactaactttattattaatactgattatgtcagatcaattggcggctggcgcaatggcgctttgaccgaagatactgatatttcttttaaaattatgggctcaggtagtttgattgccttagcctataattctgaagccttccagcaagaaccagaacgcttaaaagattattatttccagcgcttgcgttgggctaaaggtaactatgaagtggtgatcaataatttttgccatctttttgataaaagcaactggcgggttaaattagagactgtctattattcctgcacttttttctggtttaatttggcgattgttttatcagatctgatctttttttctaatttgattgccttaatcgtccatctttggaatcctgcagtagtaataccatttacaatttcgcggagtaatattttattagctcaaattctgctctttaattggctattgatggttttgctttatattttgcaaattaacctagcgatgactacgcaatatgggcaggcaactgacgaacagatttggctagccttagcatcatattttacttattcgcaattgttcatcattgtatcaattcatgcggttacttcagtaatgctagatcgcgtttttcatcgtgatagtactaaatgggttaagactaagagatttgcggattaggtgatgagatgaaaaaaagatggatgctactaggatttttactcgtaacgattgcatttaccggtattatgatctatatcagagcagataataattcagcggtgcgtaatttttttctacattcttggcataaaaattatgtagttgaagaaaagaatcttgcctatattaataccacgcctaagcaggaacaagtgacggttttatctgaaggccaaggatatgggatgtttattgcggcgcatgatccagcagttaaagaaagcaactttgctaagctagtgcagtattatttaaaacaccgggatcgtaatacgcaattgatggcttggcggcaaacaaagaaaaatggaaaatggagcagtgaacgcaatagcgctactgatggggacttatttattgctaaagctttgtttttagcggctaaaagatggaaaaccccagcatatcagcggcaagggcaaaaattaattgccgatattttgcgttatgaatataatccgacaacgcacgctttaacggtgggcaattgggccgattctaagtcgaagtattataatttaatgcggacttcagatgtattgccgacaatgtttgatcaattttatcgtgaaagcaatgattcgcggtggctcttaattaaaaaaacaatgctcaagcggctcaatcagttgagtcaccagcataagagtggcctagttccagactttgcctggctgacatcaaaagatgctaagccagttaaaggaagggttaccactgatcgatatgatggtgattattatgccaatgcttgccgggtgccaatggatttagcatttagtaaggataaattagcaaagaatactgtacatcgcttgcttaaattttttagcaagcaaaatacaattacagcaggctatactttaaaaggcaagccggtcaataattatcaatcagctagctttagcgcgccaatttatattgcggtgaatgaaaatcgcaatcaaggctatgataatttgtttgcttcgcagcaatatatttttgctaaaaaattacctaaaaataattactatgatgcagcactaacgacgatggcaacgatactgacaccggcgcatagattttaagaggcaaaggcctctttttatttgcattgaaaatcaatctttgataacatagtaaaaattttaaggaaaatgaggaggacaaaaaatgggattaaatgcatacattcaaggttttaacagtttagagtcaattgatcgagcaccgggctacttcaagtatcatcaccactcagtagctgaccactgcttcagaacagcggaattagcacaaatgatgggagatattgaagaagtaaagggcaaaaagaagatcaactggaaggctttatatgaaaagagcttgaatcacgattatactgaacgtttcatcggtgatattaagacacctgttaaatacgctactcctcaacttagaaagatgattggtgacgttgaagaaacaatgaccactaagttcattaaggatgagattccagaagaatttcaagaaatttatactaaacgtctctcagaaggcaaagatgatactttagagggtaaaattttatcaatctgtgataaattagatttgttatatgaagcttatggagaaatcgaattaggtaatcctaacccggtttatatgcaaatgttcaaggaaagtcttgaaacgatcaagaagttcgacgatttagtttgcgtacaatactttattaagaaaattttgccagatctttttaaaggtgatttcgcgggaaaggataagatgcaacgaatagcttttagcattctattgttaggggatgattaggtgaaatttcaatgtagttcatgcgggctgcgcatggactctttgcattttaagcaagaggggttaatgaatcctaagttgaccagtatttgcgacatttgtatcacgcgcaacctgaatccagaagattacgcaaatgatgcggtcgcagcttttgctcaaagcttgctttacacgtttgtcggtgcaaagaaacaagatcaatcaggttttattgtgaaaaataaaaaggaccgtaaaaaatacgaggcctttttacaagattatgatggcaatgaaatcgcccgccaacagattaaaaggtctgatttgaatttggcggtaattaaaagcgaagatggcaagcttaattatgtgcctaaccaaggcgtaacttttgagcaaaatttaaagggaatgggtttggagatcaatttccagttaaacgaagttgattttattgatcgtgaacgcattcgggccaagtataaataccgctgccaatattgcggcagacgtggccacagcgtagatcataaggatcccgtttctcttagtcacaacaacagcttagataatttaactttagcttgtgcggaatgcaaccgaattaagtcggatatgccttataagttgtttattcaactgaatgatcaaatttctgagatcaataaaaagctagttaagtatgaagatgcgctgggtactttgagagaagaatttgagcatcgtcggcgctatttagcggctcaagtacaccttaagggtgttatcaatgatcctgagctaaatgcgattagaaagcaaaataagagcttacaggatgacattgatagtttacaaagtgattatgatgatttgcgtcaaacgcgcaagacgtattttgatacgggctggaaattagctcgcattaaggaaaataaggatattatttaaaacgtaaaaaagcgctattttttgtaaactcaattcaaaataaaaaatgagttttaaaaagatcatccccatataggcaatgtcattaagttaagacattgacaaattatcgacttggacttttaagatcattcatttgcgatttatcgcatttgaatgctcttttttcatgccaaataaacccaaatcttgtttagaaattaggctacacgatataaataatatacagctgatttgggtttgagatttcttttgtcttttcgtcctggtctgatcggaattgtgtaatgactaatttgaataagaatctttttaaagatttcagttgaagaagaaattatatacatagcctggatgacaaaacatgactgtttgaaattgatcgcatattgatacttgcattttttttgtggtacatatgcttgagcatcaatttgactgactgcgttaaacataatcatgtgggcatagatctccatttcaataaatctatcctgcttggaatgaaactgtacgctacctaaagcatatttcaactttttgaatgaagtttcaatgccccagcgcaaatggtagatttctttgatcctttttaagggataatcggctctatttagattagttagaacaacttcccattcttctttgcctgatttaggatcattaattctaaatttacaggcacgaaattttattgtacataactctccaaagtcccagctgccatctttggtatttttagaccgatattttatatattgacggtaatgatggttaaccaaatgaacgttttctgtagccttatgggtttcataataataattagaggtagtcacccagcaagctatatccttatcacactcttgattaggcaactcagctacttccttaaatgcgccatatcccgttttagtacgtatgacataataacagttaggcaggcgattacaattttcaatcatgttaaagccggtataacctcgatccatagtaactatatatggtccgcaatttagctttttaagcatttgaacggcggctttacgttcatccatctttgacttaggctgaaagatgcagtcttgataagtattatttaacaggtcatagagtgcattaacatgaatttggcaatatggctttcctttatgattgagatttccaacgatattctctgatttaggattccagatttgattaaaatcagacccatcaatggcaaatatacgatatttatgatcaaataactggatattaaataaattctgattaaatacagttagaatatgcttaaaacatgcgggtgaaagctgacctttgcgttggacataagcggaagtactgactactttatcgttatttttaatagctttttggccaaaagctctaaacaactcactggtcaaatcttttccttgcatattaatagtagttttaatgactgtagctgcatctaaaaaccgcttcctagtgaaggcatgaggatcatcgataaaatcatgaatatgctttccagtatcattgataatttgatcaagacgatctaaaatatttctgtgaagggctttcataattaacaccagctttctggcaataattttgaaggtttaataatttaatcagagggcgaaaaggtaggttcttttcgcctttattttatgcaaaaaaagaaccaaatcataatgattcggttctacagagattagattcaatttgtcaatgtcttaacttaatgacattgcccatataggaatgatctttttaatttttatctatctaattcgatcttctggatcaaataaatatttgtcccatttaacttcattttgaacagtagggtggaagagcaagaatgctagcaacagttgaccaacgtaaggaattacgcccagccaccaccaaccaccgttaaagcctgcgtcgtgcagacgacgaacagtgtgacctaattgtgctaaaaaggcccaaatagctgctgcaataaagaaaataataaaaatgatgaagattacaccgattaccttggcatcgccagaatcaaattcagtaacgctgaaaggagctaaaagcatgaaagcaagtaggtaacaagcaaatacgccgattgtcatgataacttggctaattgcagtacctacccagaatgaggttctagtagatctagcatcccacttaaagcagtcaaagaagtgttccttcaagatttgaccaatagttggtacaggaacattactttttgcgccacccttaggataatcttgatcgctgaacaagtatttgccccacttaacttggcgttgaacagatggctgcaattcaagataaaataaaaacattgcgccataaccagtgaaggcagcccagtaccaatagccgctgtagccaacatcgtgcaaacgtcggatcgtttgtcctaatgcagctaaaaatagccacagataaacaacagccgcaacaataccatcgactattctaatgccggggttgatgttttggttaaaagcatagaagccaagaaggatgcataagatgccgataacaagattaatcaaagtgctccaccagaaagatttacgcgtagttcttgctttccagttgaagggatgcaaataagcctcgttcaaaatttgcgcaaaactttctgcaggcggcagtggcagactttcgtcataaggcttgataaaataatatactctatcattcattttacttcctccaaaaattaatttgttataaattatacgctaaaaaagccgtgaagcaattaaacttcgcggcttttttgatattagaattcattatttctaaagttgctcaagaacttttgcgtcttttcattcttaggatggtcgaataattcttccggtgaaccttgttcagtaatgataccgtcactgatgaacaatacgcgatcagaaatactcttggcaaagcccatttcgtgggtaacgatcaccatcgtcaaaccggttgtagcaagcttttgcataacgtctagtacttcgccaaccatttctgggtcaagggcactagttggttcgtcgaacaataaaacttctggattcattgaaatcgcacgggcaatagctacacgctgctgctgaccaccagataattgttgtggcttagccttaatgaaaggatccatgccaaccttttctaggtttttcatggcaatcttgcgtgcttcatctttagaacgtttcaagactaattcttgaccgaccatgcagttttctaaaacatttttattttcgaatagatcaaactgttggaaaaccataccaacctttgatctaaaggtattgcggttatagccgggatgcaagatatttttaccgtgaaaatcgatctcgccgccagttggttcttcaagcaggttgatacaacgcaaagtagttgatttaccaccaccagaaggaccaatgatcgttacgatttcgcctttattgatgtcaaaggaaatatcctttaatacttggtgatttccataagacttttgcatgtgctttaagcttaaaattacttcgtttgattcagtcattaattatttgcctccgcatcttttggagtaccaacttggacttggttagccatcaagttgtaattcttattaccttcaagtctcttttcgataaagttgaagattctagtaatagtaaaggttaagatcaagtaaattgctgaaatcattaagtaagttgggaagaacttgaatgattgactggcaatagtagtaccaacgaagaacaattcagaaactgagatgatactcaatactgaagtatccttgatgttaacgataaattcgttggtgattgatggtaaacagtttctaatagcttgaggcaagatgatatgccacattctttggttgtgggtcataccaagtgcactagctgcttcgaattgaccttctggagttgaaataataccaccacggataacctcagctaagtaagcaccagtgttaattgacacaataatcaaagcagctacagttctatttaaattcaagtgccagaattgggcaataccatagtagattacggctgcttgaaccatcattggtgtaccacggaagatttctacataaacagataataaccacttaactacgttcaaagtccaacgcttgccgcgagtagttggagtaggaatggtacgaataattcctacaagcaagccgataaagaaaccaacaatggtaccaactaaagctaaaagcaaggtcatgccaatacctgacataatcatgccaccatattgcttccaagtagtaactagccagttttctttcttagtttcgttaccagccttaggttgttccttgatggcttgtgacattaattgatcacgctttttattagaaatagttcttaaagtagcgttaacttcatttaaaagcttggtattaccctttttaaccccgatactagttacggaatcgtcatggtcaactttgaagccagccattttgtttaagttaactgcaataatgttagggttaacgttgtggtaactttcaaattcaatatcttcagcaacataaccatcaatggtgccagaagctaaactttgacgcatggctgaaaagtcacgcatagctggttctcttttagcaccttttaattgcttgattaaatcgtagtgcaaagttccttgttgtgcggttaacttggcacctttgaaatcagtcaacttcttagcattagaatatttacttgccttattagtaattacgacgaaagtacttttacgataaggttctgagaaattaattgccttgcgtctttcggcagtaggagacataccagcaataatcaagtcgattttgcctgatgtcaaagctggcaatagaccatcccattgagtcttttctacgattacttttttgtgtagtcgtttaccgatgatcttggcaatttgaacatcataaccattagcataggagttagaatcatcaattggaacagctccattagctttggttggctgagtccagttgtatggaggatagtttgcctccatacctatttttaacgtgccagaatctttcttagcagcttgagtctgattgctactaagagaaaaaccgataaataaactgagtaggacagacattattacagccatccatctaaatcttgacttcaattataaaacctccaaaaatagttttaacataaagccaacacaataaagagtaaacaaaaacctcgctcttccaaagaattgcgagggtcataatcatcagtgtttaaaccaaatcttatagcgctccctgggaactaaccaggacagtctatagaatattcttctatagcccaacagattaacacgcgaatattaaatctatttcggcggcaaccctaagttaactatcattgttttcgcgaactcaaacttaacttgtgattgtcgcaacctctattgcattggaaaaatatttaactaatgaagaatactagaagaaaaagttaaatttgtcaagcccaaccattattagtttcataatttctctttttcatatcagaaacataaggatttcctgctacataaaaacgtaattttttgttagcccaaacgggatcagattgattgataccaacacgcgctgcagcaattatttcctggggaatttttttatgacgatcatcaagatcaatggcgaaaggggagtctgataaaaagtgcaaattccaatttttatcatgaataccaaaagcttgcatcatttttgcgggaccattagtcaaaagaacgccatctttaccatgacggttcttgatcatggtctcaattcctaaagtgggatcgattgcacggattaaaacaccctgtggttcattctgaaccctagtggcaacatcaaagaaaaaatattgacgttgcgcgtagatatagatcgttccgcctttgccgtaaagtccttcattcgctgggctacgacgaccgccataagaatgtgcagcgcgatcctttttacccatatatgcttctgcttccacgatatagccgcctaatttttcttgaccattatcaaaagtaagcattcgcccaattaggtcttttgcaatataatcggtagtgttagtagaaaaataagttgaataattcatttttgacctttctagaaaagagataaaaaataatgacagaaattaaattagttcgaatttatgaccatgagcaacctgctggttatcggattttagttgaccgtttatggccacggggaatgagcaaagttaaggccgatttagctgaatgggataaacaaattggccctagtaaggaattgcgtcagtggtttaatcatgaagatgaaaaattccctaagtttaagcaaaagtatattgaagaacttaatcataatgattatacagcggaatttttgcaagatgtaaagaagcatttggctaaagaagatgttcttttcttatttggtgccaaaaataaagagcacaaccaagcagttgtactcaaagaatatgtattaaatacgctaaacagttaaatatgtttgtgaccgtgttttttaactttccaaaagtggaagagaattgtcaaaattaagatcgcaaagacaataattgcaaaaacggtgtttggcaactcaaatctcaatggtggcagagctagtagcaattttaaagcgatgattcctatcaataagtaagccattggctgcaattctggaataatatccattaatttaatgataatttcggcaactcctctcatacagagaatgccgatcatgccaccgattaaaacaacaacggggttatcagacacggctaaagcagctaaaacagaatcaattgaaaagacgatatccattgattcaattgaaataaccgtacgccagaaaagagatagcacatgtctctttttctttttgcctttgtggcgagctgcttcgcgctcttctttttctttctcatgttcggcagcttgtttagggtggcgttgatcatagaagaatttaaaggctaggtaaaaaagataaatactaccagctaatttaatctcccaaaagttgatcagataagtcccgattccgataacaataaagcggaataaataagcaccccacaagccataaaccaaggacttgcgttgttcagctttattaggtagcacctgtgtctgtgcggccaaaacgacagcattgtcgactgataacaagcattccatcaagattaaagtcagaatgatcatccagtctttgccactggttaggacatgtaaccagttattgccgtcaaaaaagggtgcatatagtttaagaattgacatgtagttgcttcttttctaatttaattaatctgattttttctttttgtcccagacgataagtcccaactttattgttggataaaataactctttggtcaggaataaaaatcaaaacagggtttaatgctacggcgtgtgcaactgagcgagaagatgtggcttcggctagtgaattggcgacgtcaccataagttaacgtcacaccataaggaatatgctggacaacggctaatacctttcgttgaaattcagtgccgaattccgaaatatcaataggaacatcaaaattctttctgataccagcaaaatattcctttaattgtttgatatgaggtgccatctttttagggtcccgcaccaacatgcggtgagggtagaagctaaaaataggtgaaacagtttcatctcctttaagtccgacgtaagttaggccggcttctgaagctgttaaaaagtaggtccatggctcaattgtaacgtaatcatagtaaaaaaactctgtcatgtgtaacatctttattaaaaataattagtctaagaataacaaactaggaaagttaattcaaattctggaatgctgttaatgcatccccaattatttgcgtgacaccaggggtaggaatttctgtcttgttgatagagtaaattttggcgtcttctttgcgataagccaagagctgggcaaaaggataaactacaaaactcgtcccacaaatgatgatcaagtctgatttttgcattatttcaacggactggtttaatactttcggatcaatgccttcgccgtataacacaataccggggcgaataattccgccacaatctttgtgtaaatagcttttagcatattcttcataagaaacaggttgatgacatttagtacaataaatattatataaattgccatgaaattctgttacatgttgattgccagccttagtatccaaagtatcgatattttgggtaattaaattacctttttcattacaaaaatgggcgattttttcatggattaagtttggtttagcagtaggaaagtacatattgttcatgacaaattcatggaaaaattcaggtcgattgaatagcgtactatcgctcagtatagtttcgggactttcttgcacgccatcatagattccgtttttagagcggtagtcagggatacctgagtgggtagaaacaccagctccagttaagaatacaatatgttgggcattattaatatctgtttgtaattctgctaaatccatcatataatgtcaccctccgtgaaagtcactactttaattataaatcattgttttgttataatgactgaaaattgaaagcaccaaaatcaagctcaagtcctgtcactattgagctttcttagacgtaattagtttttatatgatctgtttcagtgcaatttgtatgaatcgtggcagttggttaataaagtcattgattacttcatctatcttttcaaaactattctgtttaagctcttttaattctgaaattaagtagaccaatgcatctacgaatctaatatcaggtaaggattcgttcattagatagaataaatctccgattgtcttatcatctgtattttgtctttcctgccaggtcaatagatcataagttattgctgtaactgcgatatagccacattggccatcatagctttgaacttgagatttatctaaagcaagatattgcttagacgtcttaaaatatgtttcaatttgccatctacgaccataaagttggatgatttcttcagggctaagctttgtctgagtagtagctaaaaccaaatacttgttcttgtttccacggttggagacaaagacgagctttaataaaaagctatgtccatgatattgagcctcaactatgcttgaataaagataatgtttctttttacggatgtttgaagcagccaaacgatcatacaagtctttaacgctatagcggcgatggcgataaatgtaataaatctttgaactcttcttgatcatgccaagtccatctaaaccgatcttctttaaaatccaaaacattcttggagaagaaaaccaagaatcgaataagacgtatttagcttctactcctaatcgtaaggcttgtctaatcaactctacagttacatcattcatctttctctgagcttgatttctccttttaccagaaattgaacgttcatcagcagtaatgggagcagctccaatcatatttttcttggttttggttgacatcaaggcaaagttaaccggcaagaaggtattgccatcgctccagcctaaagttaaaccacgatatccgttcaaatactcatgcttgtcatggtcatagactttagctagcaattcggtctttttagaaaaagaccgagccatcagcgtatcgtcaacgataaaagcaagtcggcgtcttttatcgataaatggttttaagcagccaatgagccgggctgcaatcaagcataatagtttttgccagttgattcttccatcgttaagtacattgcgagcagttctaacggaaaaacgtttgtcatccttagctctgaataaagaaagccgagcaaaatgtactgacatcagccaagagataatcatggttaatgaaacggtggatttacgcttaaaattgacttgtttagttaacttagctagaccaattagattaataaatgaagaaattaaggatttagtatcattttctgtgtcgatttgttctatactgttcattgcgcaggatctcctttactttttaggtcgacacttaaagtataacgcagagagatcctgcgtttttatttttgataagaaaaagccaagaggcgcggggaaggagcgttaatcttagctttcaagtttcagtataatgattaaaataactaaattgaggggatttttatgaaatatatgacgtatttttatgtagcaattgatattttattagtagtttatgcttgttatagttggtattggcaagctaaagttgattttcgtggtcgctatcgtatctcctcagttgtttgggcgctaatttttatctggctgggctttacatggaattacattgaaaaaggtgatccaggcctgagcgtcttcttggctctttttatcttaattagtattgtcgatggtttttcaggatttagtaaaaagcggatggtcgtttcaggctacttcaagcgtacagttaagtatgatgatttagccagcgctactttaatccagatccccaaccaagagaagccattagtgatggcgatttttcgaactagcgatggtaaggcttatatgatgcgctttaataatgaagttaatagcgtaattaagcaattacaagaatatgctggtcgagaaattcctgtcgaagttcaatcaatgatgtaattacaaaattggagaaagcattcgcgagaatgcctgcaaagtccgcaatgcgcgactttgcttttttatttcttccttagttagtaaatgcgagtgtttcatatcttcttcaaaagctgccaccattttctggttgaactttttatcataaaaaacggcattatcttcaaagtttaagttgtaagaacggaaatcttgattcattgaaccaactgaagaaaaatggtcgtcgacaatcgtcgttttggcatgtaaaaagccatcttcgtagatataaattttgacacccaagcgagttaattcgttggcataccactgtgtggcgcgataaataaaggggtggtctggcttacatgggatcataattcgtacgtcaacacccgatgaggcaattgtttgccacgtagcaaaaacggcatcatcagggattaagtatggtgtttgaatccataaccgtttgcgtgccaaaagcattagccgcatcataccgttacgcatatatggtgcataacgatcaggcccgtctgaaatgatttgcgttgcaacgtcgccttcgtggatgtttttttcatcaagatcaggaaatagagtggaattgaaacgtatgagctgttgattattagtgatagaggcattccagtccatgacgaaacgctcttgcaaaagcagagaggcagaaccaacaattcttacctgactatcacgccaatgaccaaacttcttttttttgcctaaatattgatcaccaatattaaaaccgccagtccaagaaattcgcccgtcgatgacaacaatcttgcggtgcaagtggtagttaatgcggtaacgggtgatcatgttgcgtgaagtgacaaaaggcaaaacttccccgccagctgcccgcaattgatcgaaccatgctttagtagctcccattgaaccccaggcatcataaattacgcgtactttaactccttgttttgcttttttaatcaatagttgcaaaacacgattgccgatattgtcgctataaaaagtgtagaactcaacattgattatttccttagctcgtaccatgtccttaagcatgtcatgaaagaaggtttcaccttcggtatagagcttgacctgattatttttagttaggggagcttcttgttgatggttaaaaaagttaattgctatattaccagcctttgaagtgtcagaaggactagtatttttaggtgctttagcaatcgatttttgaacatttctcaagccaatgtgtttttgcttattgatggcaaaaatattttcctgggaaataccccgaccaaagaaggcataaagagtaatcccgactactggtaatactaacaggatgattaaccaagcccaagtggttgaaacggatcttctacggtggaagacaacgtagaaggctaagattgtgttggtaatgataatgattctaacaaagtcatgccaccagatcataaactcctccaaaattaaactacttttttaatttaagaaacttgtcaataatatcgattacaaacggattgtcatgcatccaactatgttcggcgtcatctttaccgcgtacttctacttcttgataaaaatgtgcttttggggcaacgatatagcgaatgctttttgcggaaacaacagagatgaatttatcagtatttgtgttatctaaaacgttgccataaatattcaagaccgagatatcaggattgaatttgcgccgattaaaaaacaaataaaggtagtgcgggttcatgacactaggccgaccactttcggtcaaatagttgacgtttgggatatcgcccaagtaagtgaccccgtcaaaaggaccagcgataaaggcacatttttttaaatgtgggaacgttttgctgcggtagtgcttcatttcagtgcgaataatacatggacaggctaatgaatgagcgactgcaatatagtttttaaaaccatatcttttagctaaaaagggcaggacgaagttgagataatagtcgatgccatagataccgactattcgctggcgaaaagcaacctgcacgataggatgcttgtcactagtccaagttccttctaatttgaaatttcctaataaatcaacggttacctttaaaaacttgggattgcccttgtcataagtagcgtgtttcaccatcacgcgagtggtataatcaccgccgcgaaagccatggaaataaataatgggtacttgttttagatcgcttttttcaatgtttgccttattttcaatatggcgcttgtgtaatttgaggaaaattcgcgtgggagcgaaggtggccatcagccccaaagaaatcatgttaaacatgctaggttcttcttggaggtcatgtttatgatctttttcaacttcttcagcatatttttttgtgttgaaaaacatttttaccaccttctctttcttttttcctataataaaagttatgcaataagtatattttaccattgggtaaagattttggaattttagaggtagaaatgaagttttatgcagtcaaaaaaggacgtactccgggaatatatcggacttgggatgcagccaaagaacaagttgatggcttctctggtgcagaatataagtcatttgaacaaattaccgatgctacagattacttagattggaatgcccaaactcagagcgatgtcctgcaaaaaggtgaagataatttacaaaacgccgtaaaaagggtgcaacaaaagagtcaagaaataaaaaaagcaccgcgaaaaaaggcgaagcagtataaccatgttaatagcaatcctgctgacttctttgcggtgacttatactgatggtggcacgcgcaatactggtgtttataagggcggtcacgttaaaaagaccgataaagcagcctgggcttatttaattgaatgggatgaccagaaagttcatggctccggtggtgaatatggtgctactaacaataagatggagcagacagcattgattaatgcactaaaaaagctgcttgagcttggttttaacgataaacatctattatttgttcttgattcgcagtatgtgttgaatgcgattaataagcattggctacaaggctggaaaaaacgtggttggagacgttcttctggaccattggctaatgtggcggaatggcaggaattagatcggttattaaaggaatttcctgatagtacgtttgaatggacgaaaggtcacgctaataatcgcggtaatgaatttgtcgatcatgaattgaaccgttatatggatcaaaaaatgtaagaaaaaaggctacactgtagccttttttaatttaaaataacgccgccgaacaaaccactaaagaacttaacgatttgatcccacaaattttgtaaccagttgcggttttcttgggtattaaatttattgaagatatttttagctccattttgaatctgactggataatttcgaagcctgttgcttgaagttaccgtccttcaatgcccctgaatcacgaatttcaattagaagattgacaatttgatttttttgattgttgttgatggtgtcacctaagtggttaatattaatttgattgttgacaatgtcgcgaatttgactgtcggtaatgttttgcccttgtttagccatctcattcttggcaccggcaaccgcattgttcaattgagcatctgaataaccttttttgtttttattatcttgggtaatcccagacaaggtattcatttcatcttgagcggcattaacttgcttttgatttaatgcattgccatttttagcataggcagcataaactccagctaatgcccctgaaccatcaattggaatagcgctagtaacataaatgttggcatcgctgatgccggcggtcagggctgcgtttttgtactggttggcagtaatagtcgtgatattatttttaccatcgtagtctaaaattttaacgttgattccgctgcctgagctggtcttttggatcatcgcactggaccaaacaccggatgaagtggtgaaattatcaccagagggatttaaatatttaaccagatctgagccggtaacagtaattgtttgataattaccaccgtttagtggggcggttaaggtctttaatgtgccttgcttttgcgcatcagttaatgatgtacctaaggtaactacaggtgtatcatcatctgctaatactggcttagtaaatgagatcatcgcgaccacgcttaataacattgctgtgagtagtgtgataaatttcttcattttttcttcttttcttcctttttgatcgaatatttattcttgtaatacggaacattatactaaatatttttcaaaagtgaattaaacaacacgtaaaactttcttaatttcgaccttattattgaagatggtataataaagagcaacaaagggggacaatatgttacaagtgcctaagttaaccatcatcatgcctgtttataacacggcgcaatacttgccacgtgcttttgatgctctgcttaatcaagttgacaagagcttcaaattgcttgtagtagatgatggctcaacagataattcggttaaggtagccgaaagctatgccaatcgttttccatattttaaaataattaaaaagaaaaatggcggcccatccgatgcacgtaatgttgggatgcagtatcttgacacaccatatgtcacctttcatgatggtgatgattgggtggatccaggctacacatccttttttattcatgcttttgaaagtcatccagatgtcagcttagtatcatgtggctattggatggattatcctgacaaaaagcaacgcgttgttggtcgaccagaaggtggctatttaacgcgcggtgaaacttatttgaagttgactaatgtctttagctcaccaatgaaaggatatagctggaacaaggcctataaaactgccattattaagaaatatcatttgaagtttgatagggatatttcactactggaagatcagatttttaacgttaaatatatttctgtggctaaaggcgtctactacacgcaaaaaccttattaccactactggcagagaaagggcagtattattcaccagcctaatattaaaaaagttgcggataatttccggggaaattaccgggtttggagcaaaattatcagtacaatgatgaaagaccgcgaggaagaaaagatgcgtaagaagttagagcgacagcaggccttgcgtgatagtgaataggggaaaacatgaaagaaaaagttaatggagtcgaaatttattatcataagttaggtaaaggtgagcctttgcttttactacatggacatcacttagatggtggtatgtttgataaaattgtggctccgctttctctttattacaccgtttacgtgcttgatatgcggggccacggccttagtgaaggcgacattgcggaacactacaagaccgaagtagaagacgtctatgcctttgttaaacaggttggcattgaaggctgctattgcttcggttttgatgcaggtggtctggtggcaatgatgctagctagaaaacatccaacgatctttaagaagatgattgtagctggcgttttcgttaatggtgcaggcattagaccatatcactacttaacggaaggctttcatcgctttttgagacttgatcgtgacagccgcgtagagttgactgagtcctttatttcagtagatgacttgaagaagattactacgccaactctttgtgtagtaggtgaaaaagactgggttaaggttgagcatgtacgttggtatagccaatttatgcccaatgcgcggttggtgattatgccacggcagacgcatgacagttatgcagtgcgcagtttaaaactgctggatttgattaaaggattttgtaggtaatacgcgtggtgctagttaaatcgttctaggcaatatgccatattataagctaaaatggctatttctagccgctgctgaaagccagctaagctccttgctcggttattttcagcgttatagtaactgagcaaagaaaagtcgctttcaattgttcttctaattgccatcagttgatgattattatgttttttagcacctttcatgttttttcgatatggtgtccaaaggacatagcccataccttttaactcggcagctaagtcttttcctaagtagccttcatcgcctaaaagataatggttaattggatgagcattaatcatcaattctgtcgtttctttggcatcatgcactgatgctttagtgactgcgtagtcaagcaaatagccatcatcgcttactagcgcgtgcaccttgaaaccataataatagactttcttggttgctttatagccaatatcggctatgtcacggaagatcttaacacgataattacgaacaggctgacaaactggaacaggaaaactgtcaataattaaaaattctccagcaacctttacctcttgattccaagcttgacggatgcagcgaattaaaggcaaaagcatcttggctcgacgattaaagcgagaatgagataagccaacaaaaaatttacagaatcttctttgggattcaattccaatttcagtttgccaaatgagcatcgctaagatggagctgtcggaaagctttgtttgatcaatgttttttcgatgcgtaagcttatcaggcgcataaagattatatagtgaacgacaaattacatttaaacgactaaaactaacttgtaaatggtgagagaaacgattaagcttgaggtagttcaattagatcagactcttttctatttaatttacttacaacttgagtctaatccgattggacttttttattaactaaaacgatttaactagcaccacgcgtaggtaatgtggatagtattgctggttaacgtgatagttgctgcagttgctgttatatttggttttcaaaatagggtagaaacattaaatctgttcaatgccggtatagtttttatcacttttgggattgttttacttttaggtgcaattcctgtttatcaagatttcagcacgtcatcaattttaatgttcattgcaggcattttaattattgttagaattattatgctagctgttagtttaattaccaaagtgccaagaacagtaaatctacaggatattgcaatttcattgatgatcgctgcagtttgtttgatatatttcatgcacggtttaaatctgagcttaagtaatttagtcgtgccagaattagcattgattattggcattattttgttttattttaaaagaaagcgtcaataaaattgattgcaaacatggacatctcttcaatagaggtgcctttttgtatataatggtggtgtatacgatttttattcagaagaggtaaataatgaacaaggaagaacttcatcaattattgcacccaatgaaagttattggcttaggtggtaaccctgcattaaatgaaaaaattgcggcaattttacaccaaccattgatcgaaactgcggttcaccactttagcgatggtgaaatccaagttaacattggtgaatctgtcagaggttgtgatgttttcgtaattcaatctatccaagatccagttaacgaaaactttatggaacttgaaattgttttggacgcacttcaacgtgcatcagctcatataattaacgtggttgtaccatacttggcatattcacgttcagataccaagactcgttcacgtgaaccaattaccgctaagttagtggctaacttgcttcaattgactggcatggatcgtttaattactgttgatctacatgcctcacaaattcaaggtttctacaatatccctgttgatcacttacatgccattccacttcttggtcaatacttcttagataacggaattgctaccaaggaagatgatgatatcgttgtagtctcacctgatcactcaggcgctaagcttgctcgtaactttggtcaatacttcaatgcaccgattgcaattgttgatcaaagaggtgctcgctatgatactgaggtccacgacatgattggtgatgttaaggacaaaaagtgtatcatcattgatgatttgattgatacaggttcacgtatttcttcatcaactaagtcagttttggcagctggtgctaagaaagtttacgttgccgcaacccacgcacttctttctaagaatgctactggagtacttaatgaattaccaattgagcaaatcgtagttactgataccattaagcacaagcgctacccagacagaatggtcagaatttccgtagaccaattgcttgctcgtggtatcgattatgtatacaatgatcgttcaatccaccaaatctttgacgaacaaaaccgtttaaagtaaaattcttattgataatttgaataaaaaatgatcctcactatgaggattattttttattcaaaaaatcgggtagataagttataaaactatgtctaaatagtaatgattgatataattgatatgtgttgtatagaaagaaaaagagaaagttagaggaatagactatggcacgacggaaaaacatgaagagacggagagttattctaggtaatactttccatctgatcagagaaaatggaatggataatgtttctttgcaaatgattgcagaaaaatcaggcatttcaaaatccttactgcagtcatactatcctcataaggctaagttaactaacgacattatccgcaatctttttaatactttaggtcaacaagttaataattatgacatggctaatagcaatcttccttatgctagaactaaggcatttatttatacgattgctatcttggggatgcacgatgagggcttggaccgtattatttctgaagcttttgttagcaatgctaccctagataattggggaatcatgcttaatgaatggattaaggaaaatcatttatttgatgacattaacgttgacgaaagcgaacttgagacaggaattgcgtttgtaactagtggtattggccgtctatatcatgatcgcaaaaaacaccatttaacggccgaagctcttgctaactatgcaacaagtgcattgatgttcagtttcttgcattgttcttctgaagaaattgatcaagccttaaaagaaggacatgaaattattgaaactgctgatatggaagttgttcaccgagcaattgatacaatgttcgatgaaggcaaggaaattttcagctaaaggggagtcgccatggttgaaggcaaaagagctgatttgcgacgaatgggttatgagcaaaataaccaatataaacgtttgttggctttcgtcatctttttgattgctgcattatcattgattacagctacttttttaaatccaatctttatgaaaaaacagattaggactagctataatagggcagtagttgttcgccaagtgaataaaaattatgatagcctagctgatttgattaatgcagatagtgaagataattcaaacttactatcggatacgcaaactcaaccaattgccgaccatattattgattattctttgggtattcattggtttaaggttactagtttgccactggctaatcagattttaagcgatatcgatcaaggaattgctaaaggctcgtcaagtggggcacaggaagttaaccgtaaactgaaaaagcagggaactaatgcaccttacgcgattattaaagccttcaatttaagtgtgatcactttaggagcaaatattgctggtttattgtttatcgttaatttgataataattattgttaccattattacaatggtttcgctactcaacgatatgaagtcgcgggctacaattcgaatggtgattcatgatacgatggctgctggcatgtgggcaggtttttggctaattttgatttcaggcttgttagcacttgtgccagtaatctttaatgtcgataatatcgaatttggctttttgcttgagattggcagtagcgtctttttggaatatgtaattgctggggtaattatttacatcatttgtgcgataccatggcaaattacagctgctaaataagaatgagaaaacgtaatctgtagaatgattacgttttttgtttgcacaaagaatcatctttctttataattaaaaaataattaacaaatttcatatgtttatattttaaaagaattgggcgagtttatgaaaaaagctaaaattataaagacttttcttgctttcattactatgctttcgactctttttttgtttaatcagcctgttaatgcagccaataaggaggttgagactggctcagtgatgaaaaaaattaagcagtcgaaagaattagtagtgggcacctcagcggattatccgccactggagtttactaccagtgaaaatggcaataccaaatatgtgggggttgatatcgagttggcaaaagatattgccaaggatttacatgcaaagctagttattaaaaacatgagctttgattcacttttggtagcgctagagacaggcaaggtagacatggttatttcggctatgacacctaatcccgagagaaagaagagcgttgatttttctaagatttattacaagccaagtggcgaatatttcttaattaacaaacgcgatcaggccaaatacaaaaaaattaaagattttgctggtaaaactgtcggtgcgcaaactggtagtattcagtattctttgattcaaaagcaaatgaaacagtctaaggttaaaggcttaggcaaaatcaacaacttagttctggcattaaaatctaataagatctctggcattgtcatggaagaaatgactgctaaggcctaccaacaaaacgacaatagcttgatggctgtgagaagtgacttgcgtgaacaacaagctggtaacgcagtagcaattgctaaaggacaaaatgacttagtagctgctgtgaacaagactattaatcgcgttgaacaaaaagatttgattaataagaaatacttgcctgaagcagctaagtatatgaagacagcgcagaagacgaacacgatgactaaatatattccttactttattaagggagttggctataccatcgtgatcacgattttctcagtgttaatcgggatcatcttagggatgctcttagccttaatgcgtttgtccaagaataaattgctgcactggattgcagtttgctatatcgaattcattcgtggtacgccacaaatggtgcaaattttatttgtttactttggtgttggagcattaatttctaacctgtcagctgttgtagcggggattatcgcaattgggttgaactctggtgcttacgttgcagaagacattcgttctggtattgcttcagtagctaaaggacagactgaggcggctagatcattaggtctttctcaagctaaggcttaccgctatgtaattattcctcaagctttgaaaaatatttggccggcactaggaaacgaatttattaccctgctgaaggacagttcattggtttcagttattggggtaactgaattaatgtaccaaacggaattgattcagacttcgacttaccgtggtgttttacctttattcattgccatgattatttactttatcatgacatttactttaactagattgcttaattatttcgaaagacggatgaaacacaatgactaaaatgatcgatatccaacatttgaagaaaactttcggcaaaaatgaggttctgaaagatatttctgcggaagtagataagggccaggttatctgtattatcgggccatctgggtcaggtaagagtactttcttgcgttgcctgaatgtattagagcgtcctacgactggtaaaattgtttttgatggaacagacttggctagtctaaaggatggtaaggaacttgatcaattgcgggaaaagatgggaatggtttttcagaactttaacctttttcctaatatgaatgtaattgaaaatattaagttggcaccgatgaaagtcaagggtgttagtgaagctcaagctgagaagactggactagtcttacttgaaaaggtgggcttggccgatcgtgcaaaacaatttccagctagtttatcaggtggtcaacagcagcgggtggcgatcgctagagccctagcaatggatccggaagtaatgctatttgatgagcctacaagtgctcttgatcctgaaatggttggcgaagttttgaaaacaatgcaagatttagctaattcgggaatgacaatggtgattgtaactcacgaaatgggatttgctagagaagtagccgatgaggtctggtttatggctgatggctatttacaagaaaaaggcacgccacaggaagtgtttgaacaccctactagtgaacgtgcaaaagatttcttatctaaagttttataatcaaaaaggctcaagcattgcttgggccttttaatttactcatctgtaatgatggggtttgataatacgtactgtcttacgaaaaaattttgatgccatcctttttgaattaatgcattaaaaaaggtgttttgattattaggcaaagcagtggctttgggaatgatgacagcacgtaaaatcttgttttgaagtaaaattggtgattgcacatctgtttcgctatttaaattagtggttgcttgattggtcggcgtgttggttgtatcctgctgaacttgataatttgtagtgtcattagtactatcttgcttaaatagcttgaatctgtacttctgcacgcctttaacgtcaacttcatattcatgtcctgcaactaggttagtatttgcgggtgaataagttaggatcgttctaaaattgccgtagccacaggagctgtaattcttaacatgagctgcagtagtaacaactttagtatctaaatcagtgatagtaattgttggcttatttttaatggttctatctgataaatagagcgaccacatgatatttttcccttgaagcaattcaatagggaaaagacgcatgctaggataagcaactaccggctgactagcaggacgaaaagtatcattaatgtttagtactttttgaacggaatagcggtagccatttgtaccataagctgccccaatgcctgtagtggttaaacgacttgaaagtagccaagctcggtgaccggtatctgaaccagttaaattataatggtcagtaattaagtcagtgatcacatccccagcggtttgctgtgaaacattaaagtttaaatttgaagtttcagaagtgtctttagctagcttccaaacaaatttggagatattgcttggcttagtttcactaggtaaaccatgttggttaatgaatgggttagcattaattgcggccattacagcagccgtaatctgcgcgtttttattaagtgtatcagtagtcgagatagcgggcagactgaacaatgatcgatagtaattgatataatctgtttgcgttttaatgtattttggatctaagcgacctaccttaaattttttgcttagatttggctttttagcataaatatttgcggcactataactagttttatcaaggttcgcatattccttttgaaaattatgaacttcgttaacttcttgtgttgtgaatgtcgctgcttgtgtaacttgtccggcgagggggataaataaagttgcggcagcggcaatagaaaatttccgtagaagcattttagactcccttctatggttgtcagtatacctttcattataaactataaccaatgaaaaggctttagtgaaaaatattccactattttgcgcttttctggtattctttgcgtataattaaagattggaacatttaaaagaggtataaaataatgactaaaaaattacaagttggtttgatttttggtggtaattcatcagaatatgaagtatcaattgtttcaggccgcaacatctataaagcaatcgacaaagataagtttgatgtgcacccaatttggatcactaatgaaggctactttgctaatgaagaagaaagcttcaaggttttagatgatccttcataccaagttaagaacccacataaggttaacaacatttctaacttaattgaattagaaaacttgccagaaattgatgttttcttcccaattgttcacggtaacttaggcgaagacggtgttttacaaggtttgttccgcttgatggataagccattcgtcggtgatgacgtcttaggagccgctgtaacaatggataaggaattcactaagatcttggctcaaagagttggtgttccagtcgctgattggatttcaattaagcgttttgaatacgacgacaagaagaatgctaaacttaactatgaaaaggtagcagaaaaattgggccgcgacatgttcgttaagccatctaaccaaggctcatcagttggggttagtcacgtaactaatgctgacgaatatactgcagccttaaaagaagccttcaagtatgacgataaggtcttagttgaagaaactgttcctggcaccgaggttgaaacagctgtcttaggtaacgacaagccaattgtagcaggtgttggtcaaatcaccaatgcaaaaggttcattctacacttatgaaaataagtatgatgataattcaacttctaagttacaaatcccagcagatttaccacaagaaattatcgatactgttagagaaaatgcacgtaaagtttatgcagcaactgaatgtagcggcatggctagaattgactccatgctcaccccaggtggcaaggtagtcttgactgaagttaacgctttaccaggctttactaatatcagtatgtatcctaagttgtttgaagaagcaggtgttccttacagcgaattgattacacgcttaatcgaagcaggtatggaccgttttgatcataagaaaactttgcttcacaagcatgactaaacgccaaaaatatagaggtagatttcaatgacgactaacaagcatgattttgaagaattggctgcaccaaaagcagctgcacaagaattaggaattagtgttgccacgttaagaaagtattctttaatcgtggagaaggtgaccggcaagagcgactattttgctcggactaagcaaaaggctcgtctgtatcatcaaaaagatattgatgacttaaaggcttttcaccgtttatctaaaaatagtggcttaactttgcaagaagccgctcttcaaatctatgctgttagtgaaaagaaacctgaacctgaaactaaagaaccagctcctaagcccgcttataacagtaccgatgtaatggatactgagcaggtggttaagttgcttaacactttgcaaaagacaatttctaatcaaaatgaggcaattaattctttgcagaagcaattgaatgtcattcaaaagcaaaatcaagatttaattgaagcacaaaagcaattagctgcgccacaagatgatttagataagtttgcggctttgccagatatttctggaattgtgagtgcggatgaacctaaaccgaagagtgaagaagaaaagcgcgctgaagttaaaaaagacatgaataagagtcaagaacaaatgcatgacgagattatgtctaaggcaaaggaaaatgccaagaagcgggctacttcaaatgttcaccgtacactagaagatatgcaattaacggaccaaaaggaacactggtggcaaaaaatctttaagttttaaacaaattgattaagaatcaagagctgacctaacaaaaggccagcttttgttttacagtaggcgtataacaattaataggaagtagaagtaatgaaatttaaatggaaaaagcgctatacgatagcagttatcgtgacaattgtaggagcattattgacggtcttgtcctattttgccactgatatttaccacaaggacgacgttgccgtgattaccgatagcaagatcaaggatactttgattgaaaaaagtgaagatgtgtataaaaatgcggatgaaactcgccagcaaattttgcacttaaaagttttatcgggtaagcacaagggcgaaacttacacgactaaaaacgtgtattatccttcgcaattgacgacgcaaaagtatcgtgcaggtcagagaatttttgtcaatatcaagaagggtgatccagcgatcgttaatcctaagcgtgattgggtgttagttttggtagtgacaatcactttagcattgatggtggctgcagtagggaagcactcactctcgctggttgtgtcaatggtaatttcgtggctgatcttttatttgattatcatttgggatgtgcatttgaatggcgcccacattattttgctgtttggcttagctgatatcgtcttttcattctttagcttgctcattgtgcagggcttgaataaaaaaatgttggcgacttggttggcaacgctgctaggagtatttgtttcttttgccttgtgctacgtgatcatgaagttaacgggtgaatcggaaatgaaatatgagaccggtgactatgcaacgcaagatccacgaggcttgtttttagctcagactttgattggaattttaggtgcagtaatggatgaggcgaccgatattatttctagtttgtatgaattaattcaaactaaaaagaatattacgatgagacagttgattcatagtggtcgaacgatggggcaagaaattatgggaccgttgattaatgtcttggtcttaatttttattgctggtgcgctgccagaaactattttgtacttgcgtgataataatactttagcttcaacttttggctttactctgtcgctgggggcaacgcaaagtgtgatttcggcaatcggaattgttctgacggttatttttgcgacaggatgcagtttgttcttcttgaaaaaacgcgattggaagagtttgtttaaaaaagaaggtgagaataaatgagtacattatttgcattgatcgttgtcttagcgattttaatgacaatcgtcggtggtgaaactggaattcgtagtttttttagtgtgctaattaatacgattctattgatcttagtggcgatgctaatatcatggggaattaacattgcaattttgacgctgatttttattcctttaaagctagttacgattatctttttaggcactcatgactatacggtagcaaagaattcattttattcttccttcttagtgtgtttgattattagcctctttattttgggttgtcaatacctggctcaagctgcaggactaggaccagaggcaggagagttattggttggcttgtcgcagatgccgggcttgagttatccgatgattgccgtgacagtggcgattttctcaactttgggtgcaatcgcggaagccgcggtagcaatgagttcgggcttgctagaaatcaagaagcataaccctgctatcggtgaagaagagttgatggcttctggtacggttattggtaatgatgttttgggtacagcaatgaacacgattttatttgggatgttcggtagttttttatcattattcttatggtatttccgcttgcattacacgattggtgaagttttaaatgaaaaactttttgtaaatgaagcgttaattatcatgtattctttgattggggttatattaacagtgccactatcatcatttatgctatcaagaggaatgagcaagaaaggaccaaaacatgagagtagaaagtctgacgctgactaactttaataatcgtgaatatcaagttcatacatatgcgctagagcctaatcctgaattggttgagcaaaagcgcccgctagctattgtagtaccaggtggtagctttaatcacttatccaaaagagaaggcgaacccgtagccttagcatttaacaatcaaggcttcaacagtgtggtgatggaatataacttagtgcaagatccagacaaaatttaccctgatgcggggttagatgttctaagtactgtgaaatatttcagagaccacgctgatgagtatcagttagataaagataagattttaacagttggcttttctgctggcggtcatgtggtcagtgtagctaataacatggctttaaataaaaattatcagacaaagtatgattttgataagactgatgttttacctaataagacaatcttaggctatccgctgattgatattaaaaagattggttttccgattccagaagatcaaaaagcaaaaatgcctgtagaggaagagattttggatagtgcattaggtgttacacgtgaaacgcccgatacatttattttccaggcatgggatgatccggtggttttgatcggaaattcgattgaatatattggtgctttgaataagaataaggattcagcagaagctcatttgtttaaccacggttaccacggcttttcattggctcgtcacaatgtggaaactaaggggcaagattggcaggataatccgcacgcggcgcactggttcaacttggcaatggaatggctaaagagtgagtggggcgaatgatgtgaagcataaaaaatcttctaaccctaatgacaatatctatcacactatcgtcaagaatagaaaaattgaccgaatgattatgccttttgaagcggtgtactgcgtgtggctaatcattacgctggttcttagctttaagctatttgcttattcgattgacgcacaatttgtgctaatttctctattttttcttagcgggtgggtttcgtcattggttaagaatcatcgcatgaagaaaagtagaaaataagataagtaaaaagagttctcgcacgagaactcttttttattagaatcatttactttttatctctaaagaaaataacttccttagcagctacaaatggtccagatgacttgtaaacctttaatctaatagctttggcatcgacatttcttaagccaacaaccttattcttgctatcagacttccaagtcaagtgatcgccgtatggcttaaagttaacgccatcgcttgaaagctcgacactaacttcaacaggatcgccttggtgatcaatctttctaggtacccagcccattcgactcaagtgttccaaatgattaaaggtgaagtttaattcaagtggcttgtcttcgctgaccccatcaatggtttcccattcacttgctaacttcaaatcagtcaagtaatcaattggatgatccttaggactagctagactgctcgtgacatgaatgtcattaattgcatagttcattggatcgggcttggtaattgcgccaaacggatctgaccattctgaaactttgttgccagctacataacgcaaacgcagggtgtagcgggtatttggcactagttcatggaaagtaaatgaattaccatcaatgccatcatgtaaaatgccgttaacttcgatttgaacttggtcggttaattgcggccaaactactgttaatgaatgagagctaatcttgtctggatcaaccattggttgttttggtgaacgcaacagtgaatccgtaatagcgtgaaccaaagtttcattgccatatctgaagtttctgatcgtaatctcaattttagaatcggtaatatcgcgtttagctaacttaatttgtaaagcagtttgtttcttttcttggtattgatcaaattcaggcatccagctgtaatttgtgttaaagaagaagccttccttagcatgggcgaaggtatcaacggtaccgtactcctgcatcgggatttccttgtcgttgattttaacagtcaaaccatcaggataaccgtcacacatgatgttcaagttggtggtgttttccgtttggaaagtattgaaatcgccttgagttgggtcgatggtgatcgtcaatttgcttgcttctaaatcactcgtgatttgtgtagctacatggtttcttgaatagtcgttatagccgttatcatcgtaagtaaccattttactcttgccttgagggtagaggacatagttgcgttcgccgaggtcaaaaatagcgccgcctcgtacaaatactggtaaatgccaggatgggtaagactgcttattataaacgcgtccgcccaagtactttttgccatcaaataagtcaacccacattgttctgtggttaggcaagtaaaggttgtcttttcttgaattgccattaccatcttcgcgaccgttaacaattggcgaaatcaacaagttaggccctaacataaattcatggcccacctgtggggtgtagttgacttgttcatgtggaaattccaagaataatggccgcaagattggctcaccgacttgagcgcggtagattagggtatataagtaagtctgcaattgctcacgtagttttaaataggctcgattaatttgcgtcatcttactattgtaagcaaatggggtcttactaaatttaccttgatcgtctaagttgaacaggattggggtaaatgccttccattcaaaatcacgaatggcaatttgagcattaccaccgccagcggtaccgtcaacggcactaccaactaaaggctggcccgaaaggctagcccccaaaaagccagcaacttgtgttggaatgttttccaagttgccgccaatgtcaccaaaggctagcattgttctattttgactaccagcaataccagtattagagaaaatcaacggccgcttacgcttcaaattgttgcgtaaaattagcgcatcatttttcaatacttttggatcggttgtgtccgtttgaataaaggtggtatcaggtgaagccttcggtgtgttgttttgactccaaagaccagcgctaacgtcatgtatagcggcgtattcactgaagctagccatggcttcttcgttgatttcttgcacatcatagttaggcacgatccaacttaatttaaaatgctgcttctggtagcgatcaaccattgcccgtgctgagaattgatattcttcttcgccattcaaagagcccttgccactagcatcttctggcttgttagttctggtgtaataattaccgtcttcaaacataacagcattacgttccttagctttaccaggctgccataaggtagttaaaaagttgccaacatgacctaatcctagtgcatatttaggtggcatcagcggcttacccgttaacatgtaatactttgccaaaatatttttgggtgaattacctaatagataaaaggtatcaaacatgttggtgtcgtgctttaagatagtggcatccggattgcttttaccaaagtcataattgccagcactctcagtattgcgcaattcaccaaagccggagttagcccagaagaatggcacttgggtcaaaacgccgcctttaccggtaatcttgtcgcgcttgattgaaatgatttcacctttatgactgaagtagccgttctgcatcccgccaccaaagtaaaattcattcttgtgttgcttcaaaatttcggtagtttgatcattgcctaattcaagtggactcagctgaaccaaacgattgcggtgcagcgtctcgtcaaagatgctcattacggctggcttttgttggaaaataagttgataattgccagacttaatgattaaggaatcgctggttgccttaggctgtgatttttcaaaatagtcattgttgaattgagacaggtcaacaaaagatgagtgattctcgtcaaacttcttagctggatcgagaaaatatctgaagatcccgtcagctaaaatataaagacgaacaatatcgccggtggagtagtgaagttcataataatgatcacgtttgttggcaccgataagttggcctagttgatgtctttctatttggttttgtgtcatatttattcttcctatttaaacttgctaccttatattataactaaaaatcaaaaaacttcttaagcaattgtatttactaatatgcatcaacaaaaaaagctctgctattatgcagagccaccgcgcgtttgcaagttatcgtcttactgcgcatgcatccatgatcattggacgcgacaatcttcctatgcacattatagcatgataaaaatacgatgcttaaactggtatttaccaattttgttagatataattaaattaacaattacgatttagacatataaagaaagaagatatttatgacttattacattcatgcagataaatttttcttagaaaacagaacagaaaacggcggctatcttgaagttcaagataatggcaagtttggctttttctatccagaaagcaaaaagccagaaggtaagattgtcgattatgctggcaaatgggttgcaccaggattagttgatacccacattcacggctcattgcgtgaggatgtaatgaagagtgattgggaaggtattaataagatctccaagggcttgcttagtgcgggggttacttcatggatgccaacaacgatcactgctgcaagcgataccttaactagaatttgtaagatgtttgcggaccatcaaggacaagaagaaggggcaaagattcaagggattcactttgaaggaccattcttcacggaagaacatgctggagctgaaaatcctaagtacatgatggatcccgatattaatgaatttaacaagtggctggacgcttctaacgggatgctgaagaagatttcaatggctcctgaaagaaaaggttccaaagaatttattcgtgaagccgttaaggaaggcatagtagttgttttgggccactcaagcgctagttttgaagaagcagtcgcaggcgttgaagcaggtgcaaccatgtttactcatacctttaacgggatgcctgatccaagccaccacacgccatcaatttctaatgcggcaatgacgcttaataatgtgaccgatgaattaatctgtgatggccaccatgtgcaaccatgtatggctaagactttgattaatgcggttggtcctgaacacattgccttgattactgattgtatggaagccggtatgatgccagatggtgattacatgttaggtgaattgccagtctatgtaaaagatggcatggctcgtcttaaggatggcgacaatttggctggatctatcttgcaattgaagcaagccgttaagaatgtagttgactggaatatcgttactccagaaaaggcagtgatgatggctagttatgttcctgctaagagtgcccatatcttggacaattgcggtacaatcgcaccagataaggatgccgacttcttgattttgaatccagatttgaccttaagtgaaacttacctaaatggtgaatcacgttataaggcttaatttgttagtctagttttaaatagtcctcattagattgagggctattttttgaccctaaattttggcaaatagtatacaattaataatagtaaagtaggtattatacattaggagaaatttattatgccagatggagactgtaaaatagtttgtgtaaggatgaatgattccttaaatttatttctttaaacattagaaaaaggagttcctttctcgtatgattggtttgaacaaaaaaaacacatacagaaagaagaactccttcatgaatgattttaccaaagattttgctcaagctctattcaatccagacaaaataaatgatttattgcgcaaagaactacaacaggctgttaataacttgctagaagctgaattgactgcctttctgggctatgatccctatgccagaaatggctggaatactggcaactctagaaatggtgcttatttccgcaaagttgatacgcaatttggcccaattgaagtgcaagtgcctcgggatcgcaacggtcaatttcatcagcacacgctgcctgactacaagcagcactcggatatcttggaaagcatgattatcaagctttactccaagggcgtgaccaccagggaaatagccgatctaattgaaaagatgtatggcagccattacagtccagctcaggtatcaaatatttccaagcagatgattccaaaggttgaggcttaccacaaacgcaagctaagcgacaagtttttctgcgtctatttggatgcgacataccttcctttgcgccgagaaacgtttgagcgtgaagcagtctatattgccattggcattaaacctaatggacataaggaagtcattgactactgcattgctcctagtgagaacattgaagtctggacagagatgcttcaaaacatgaagtccagaggcttgaagcaagttgaactctttctttctgatggtgttgttggcatgaaaacagccttggccaggacttatcctaaagctcattttcaacgctgtttggttcatgtcatgcgcaatatctgcgctaaagtacgcgtcgacgatcgtgaaaagatcatgaacgaattcaaacaggtgcatcaacagacaaacaaagaagaagccacagctgtcctgcatgacttctataccaaatggggcaaggtttacagccatgttatcagaagcttgaaagacatagaaccagatctgctggtcttttataactatcccaagcagatcagagcttcaatttattcgactaacatgattgaatcatttaacaatgtgatcaagcgcaaagctaagcctaaggcagagtttccaactgaacagtcgcttgatgcttttattggtattcaggcaatgagctacaatgaccgttatttcaatcgaattcataaaggctttggtcaggttcaggacaccttagaatcctactttgattaaataaataattaaaaaatcaatttacgagaaagaactatttacacaaaagatttgacagtttcgccagatggaatcagtcaattactagtactttttatgtaataactttcaattaattgaataatttgtactcttattgattaaagaaaagtatcacatatgtttcatgaatctcgtctagccaagtaggtgagattttttattacgtttctatgtaatcgctttcaattttaaaacaaatgtgctatattatgagtgtaaagaaattaagaaataaaaatattaaataagtttaagtaaaaggagagaggtgagttccgatgggcacttgagagtagaaagtcatatatatagaaaggtttgtgataccaatgggcatcgtaaattgaaaataaaatgtagttcaataatcatcaagtgatattaatgtacataagaggccgtgaaattattagtaggcatagaataataactatttgatgaatcacttggattaggattaagaaagattttcatacatgataaatattaataagaaatgacccttcgctggaatgaagtatgcgaagggtcatttaattttggcttgaaaaacgtttggtatttagcattattgttatttgttaaatataatatgaagtacatgtactaggccgatagagaggaaagttatgacaacagactcaattaattttaaaatcgatgcagaaagtaaaaaggtgatgattaaagaattagcaattattaatggcttaattcctgatgatgataatacagtagataatctaaatgattattttaaaaacttaggaatttaatggtttattggtcttttatctgatgtagtaaatcatgatttagtaagtcgtaatttagtaaaatataatttagaagatggtgatcttatgtttattggacgaaagaaagaacttactaaattagagcaatttaattagcgtggctaaaagatattactacttaaacttcccacacgcaaaattgcttgtttcattgtgattctgcgtgttttgacaaatataaaaggcacaagtccttttcattgctataattatattgaccaaaacataatttatttgcatgaaaggcttgtgccaatgtctattttaccatctcctgaccaacaaaatgaacaactattttcaaactcaatcatcagcttcatcaagaagtttcaggtgatcaagctgttgagaaaatgtggcttccgcaaggaaaaaggcattagcctgttcagcttgtttctttacgttttaagcaatgtctttcgtgaccgcagcttatatatgcagctgaaaatggatcattttcaagaaaatttttccaagaactcatattaccgttttatgcgcaacgttcacgtcaattggctccacttcaccacacttctgtctgcgcaaatcattaataaccacttgcgatctttgacttcagaaaaacgggctgattgctttgttgtcgatgattcctacttctctaggaccggcttcaagaaaacagaattagtcgccaaagtttttgaccatgtatcaatgacttacaagaaaggttttcgcatgatgaccctgggctggactgatggagcttctttcatgccaatcaattcagtgctgctgtcttctcagaagctacagaatatgattggcgaaaataaagtttttgatcagcgcaccattgctggccaaagacgtatgcttgcccggactaaaggcacagacgtgatggttaatttaatcgaccaagctatgaaagcaggtcatcaagccaagtacgtgctgtttgacagctggttctcaaatccacatcaaatcgtccagctcaagcaaaggaagctggatgtgattgccatggttaaggttagctccaaaatcaaatatgaatttgagggagaacgcaaaaacatcaaacagatttatcgcagctgtaaaaagcgatgcggccgttctcgctacctgctgtcaatcccagtcaaagtcggacgccaggacaaagacggtgctaaaatagatgcacggattgtctgcgttagaaaccgtgccaatcgcaaggattggctggcaatcatttgtaccgacatgtcgcttagcgaagatgaaattatccgcaactacggcaagcgttgggatattgaggtttttttcaaaacttgcaaaagttatctaaaactaagtacggaatatcatggcctgtcttacgatgctttgaccgctcatgttgccatagtttttactcgctacatgcttatgtcagttgccaagcgggacgatgaagatgaacgcacgctaggcgagctgttctattgcatgattgatgagctggcggacattacttttagccattccttgcaattgattactgatgcaatgctggccagcgtaaagcaagtctttcatgccagtgaagcacaaatagctgaattcacggctgactttatcaatcgtttacccaaatacatgcaaaaattgttaaagaaaactagcaaaaataatatagaagcctaaagccaagcaagatcaagagattactggcttatttagtgtgggaagtttaagtaaatataatttattcaagacatcataaagagcatttacatgaagttgacagtatattcgaccatctttacctcgaaaaatattttctgattcgggattaaaaggttgatcaaaatcagagccatcaatcgcaacaactaagtattgattatctaataattgcagtacattatttgcccggctaagttctaacataatttctttaaagcattcaggctttaatttagccttttgttgttcaaaagccgaagcagtcattctagaatttatgtcaggaaaagcatgaaaaatttccgaattcaggctgccagctcccatgttaagaattaacttaatcaaatcagtggaattgagcttacgacagcgagtaaaagcttgatcagatacagagaaatcgtgaatgttgtcagcgattttattgataatactatccatcagctttaaaatatttgagtgaagggatttcataagaggcacagctttctatgaaagaccagataatatgacgaaagtgagcagaaaggcaaataaactctgctcactttttattttaaaaagaaaaaagaccgaatcaaaatgattcgatctttaaaagctgtcgatataatgtcaatgtcttaacttaatgacattgacttttcgtcttcgctttctttaatattcaaattttgggaattagactaacttctttctgatccaaccagaaatccagtcgatgatcaccaccataatgatgatccctagcaaaatgataccaacacggtcccattgacgatattgcaaagcaataatcaatggataaccgataccaccggcacctaccaaaccaaggatagatgcggaacgaatggaaacatcaaaacgatacaaggtgttagaaatcaaagctggcatcaagttaggcatagttgaaaacatgattacgtggaacttagaaccaccggctgcaataacagcttcgtttggcccttcttccaagttttcaatagcttccgagaacaacttggcaagcataccaactgagtggaaacctaatgccaaaacaccggctgcagaaccaggacccacggccttgatgaacatcaaagcaagaacaatttcagggaatgaacggataattgccaaaacaattttaccgattcttgaagtgtaccaatgcttgtgcttggtgtgagctgcccagaaggcaaatggcaatgaaataattgcggaaatgaatgtacctaagaaagcgatacaaatggtttgccacaattgtgagaccaagtcttcacctgagccattgtaaacatagctccagtcaggatggaaaatacctgagaagattgcaccggcaatttgaccagcagtggctttaataccaccgaagttaataccagtacatgaccaaacaataattacgatagtggcaattgcaattagccaatgtgcaacttgtttcttacggtcaacgggtttagcgggtaattttttcattgtagtatccattatttcattaactcctcccgtgacttagatgaaacgtagtcgatcaagacaacaactacgataataacgatgatgatcgtaccagtttgagcgtaattgaagacctgcaaagtttgttgcaagttcaaaccaataccaccggcaccgatataaccaaggactgttgatgctctgacgttgatttcaaatgcatatagaacatatgaaatgaagtaagtgataatttgtggcataactgcgtaatggataatttgcaatttgtttgcacctacggcagtcaaagcttcaattggacctggatcaattgtttcgattgcttcgtagaacaacttaacaaccacaccaaaggtgaagactgctaaagccaagataccagcaactggaccgatacctacgatagctacgaagatcgcaccaagaagcaagtcaggaatggttctgacaatgttcatgatcacacgaagaatgccagtcacagccttgttcttaacgatgttacgggcaatcaataatgagtagataaatgcgacaacagatccaattaccgtacccaagacagccatcttgatggtttcaatcaacttaggccaaacaacgttcaagtagctccaatctggatgagacatttgaataaagatgtcagcaaattggttccagttttcaaacaagacactaatgtgcgtgttagtaacattgattgaaataaatagtcctgcaatcatgatgattgtccaaaccaagttcattactttgaacttacgcttaggcaattgatttacttgttcaggcattattcatcctcctcgctgccgttaccaccattgtaaatattagtgaagacagacttaggagtatctttcatcttgccatcgtaaactacttgaccagcacggataccgattactctttcaccaaattgttgtgcaagttcgatactgtgcaagttagcaactacggtcatgccgtatttttcattaagcatcttcaagtcattcatgactctcactgaagtctgtggatcaagtgatgcagttggttcatcagccaagatgatctttggattttgcataagcacacgtgcaatagctacacgttgttgttgaccacctgataactcgtcagcacgtgcataaactttatcggccaaatcaacttgttgtaaagcttcataagccttttgtttatcttctttactgaataagttaaaagtagtcttccaagttgggtagtaagctacgcggcctaccaaaacattgcgcaaaacactagaacgcttaaccaagttaaagttctggaaaatcattccgatatcgcgacgtaatttacgcaaattcttgcctttagcacttgtaattgatttgccgtcaatcaaaatatcgcctgaagtaatatcatgcaaatgattgattgaacgtagcaaagttgacttaccagcaccagacaaaccaacaactactacgaattcacctttattaatagttaagttgatgccctttaaacctacagtaccattgtcgtagatcttggaaacatcttttaattgaatcattggcttatctgccatttaatcgtcaaactcccttaattaaatttattatttcttagttgattcaacgatcttgtcgtatttacggataacgttgaagtcactatcttttgcgtatgcgtaaccttcgtggctatatacgctttcgataactttcttaccttcctttgacttagctacagagatgaatgccttagcaagcttcttacggaatgacttagacatacttggaattactgagatagtgtcgttaggaattggcttagtaaagtaaattggaacaacttgactcatgatctttgggttgtccttcttaacgatgttacgtgcatcttcaaagacgaaggctgcatcagtatcgccgtttaatacgttcaaaacagcttggtcgtgaccagtaacagtaactaacttacaactcttagttacgtccaaacccttttgcttaagttcagcaactgggaatacgtatccagcagatgaagttgggttttgtactgaaattgacttaccctttaagtctttccagttcttgatctttgaacccttcttaacaaggatttctgcacgatagctctttactaattggttagttgctttaccacctggttgcttaacaccgtaacgttcagcttgcaaaagcaaatcggctgcgccttgcttgtgagctaaaacataaccatctggtggaagaaaacctacatcaactttctttgatttcatagcttccacaacggtgttgtagtcagttgacatagaaacgtgaactgggatacccaatctctttgaaagcatcttttcaagaggctttgcacgagcttgcaacttagttgcagcttgacttggtacaaattgaatagttaatgactttggggtataaccacccttagaactattactcttgtttgaacacgcagttgcaactactgctacaagaagtgcaactactgctaccaagattcttctaaatcttttcattatgtcctccataaacataaatacacagtgataaaacaaactactctacatcacaaaaaaagacttaattacgggtcgccaaaggcgatcaataattaagcctaattaatgacgtttctaataactaaacgaacagaaaaaacgtctttacgagcgaaagacacatcctttgcaataaattgttctgattgcataaacattatctttcactcccctttttcgttcccacgttcatttgataaaataataccagaaacattcgtgttctatcaaggtattttgcaacttttttcaaaaaaataatcgccaatgaatttagaatcatttggcgattattcttatattagttctttttcatagttggcttaagaggattgtttcccatatcggttttaacaatcaaaacatcagctaaagcatgttggtttacgtattcagtaactgaacccatcaacattctttcaactgcattcaaaccagtagcacccatcacaattaaagtattgtggtggtccttaatgaagtcgtaagaaataatgcgcttaggactgccataacgaatgtgataatcaacatcgtcaaaaccgaagttatcgtgagcccatttcttcaaactcttcaagtattcttcagaatcttgaagagtttggtaaatggtatctcctgaaatcaaagtgtcttgcatttcacccataaattgacgcgtatcgattacgttcaatacatcaacatgagcaccatcacgcaaaccaacttttacagccttgtcaaaggctctttcagctgattctgagccatcaactggaactaaaatgctttcttttgttttatctgtcacgttaattcatctcctataaattgcactagtacttaccctttattttagcataattttgaaagccgttactttttaattgattgtttgcttgaagatttgttgctaaaataatattcatgacattcattaacagaaaggggagaatttttttgactaaaaaattaactaatcaattaatcggagtaactagtggacgcaacttccgtgaacttggaggctacgaaactatgtctggcaagaaaatcaagatgcacaagttattaagaactggtaacttagccgatctttcaccattcgacaagcagtttttgactgattacggcgttaaatacgatgtcgacttccgtagtaaagaagaagttgataatcaaccagaccgtgtcccagacggcgtagaatacatttacgatcctgttttcagtgaagacttaaccaattcatccaagagtttaactgacttagatacacaagcacacgacgacgctgattttggcttcaatcacatgcattatgcttacgaagacatgatcgaaagtgaacctgcacaaaaggcatatcgcaagttcttcgatgtcttgcttgaaaatacggtggatggcgaaagtgttattttccactgtactgcaggcaaggatagaaccggcttcggtgcattacttgcattatctgctcttggcgtaccactaaatacgattaagaaagactatcttttaaccaacatcactaccaaggatttcgtcgacagtatggttgaacatgcccgtcaaaatggtaaaaatgaaaatgtgctgcaatcgattcgtgacattcagagtgtccgcagtgaataccttgaccatgctgttaaagtactaaacgatgaatatggcggtattaataactacctacgcgatgtaatgaagctctcaagtgcagacatcatgaagttgcgtaatatttatcttgaagattagaaaaagaaggctaaaaactagtcttcttttttcttaccaaatttttgctctaaaaaggcataaatcgcgctaggatcagtaaaattaaaaacttcgcgcaattcgttggctggcgtattagccaaaaaatccatcacttgagctaataatgcagcttgcccatctgggtcattatctaaaagcatgaataaaaatttaacttcaattgcttggctaggattaatcatattatgaaaagtgactggcgttttcagcgcaaccggaacaatcagtctcgtgttaacaaactcgccctcggtgtgtggaatcgcaatattaggaatatttttacctagtgttgcagtatccaatcccgttggaaaattatgctctctttcgacaatatggtgtaaaaagtttcccttaacatagccactttcgcgtaaatgctcgtaaacttctttaaaaaccaaatcttgcttagtttgattagaaataaatactgcatcaggtgcaaaaagattttgattagtcattggatttttccttactaatgtggaattaacattttcaccataagttaacaagacgtttttttcaacccaaaagatggtaaagttaaggtaaatcatttttaaagggagaaaaatatggcaaagacaaaaactttatactttggtgccggttggttcaacgaaaagcaaaataatgcttacaaagaagcaatggaagctctaaagcaaaatcctaccgttgacttagaaaacagctacgtacctcttgataatcaatataagggtatccgcgttgatgaacaccctgaatacttgcacgacattgaatgggcatcagctacctaccataacgacttagtagggattaagtccagcgacatcatgcttggcgtttacttgcctgaagaagaagatgttggtctgggaatggaacttggctatgccctttcaaaaggcaagtacatcttgttggtaattcctgatggagattacggtaagccaatcaacttaatgagctggggtgtttgcgataacgcaattaagatcagtgaattaaaagacttcgacttcaaccgccctcgttacaacttctacgacggcgcagtttattaaataaattaagcagacatactaatatagctaagcataactaaaacgacatcgctaattatctagcggtgccgtttcttttttcagattacctaaattcatcaaaaaagattccaagaaccttttctaacttttaatcctcaattctttctctaccttttgatctttgttctaatggatcatatcccaaatcttcaatctgcaatcttttttctttagcagacatttttgatacttcgtcccaaaaattagttttttcttttttcatttcaagattgccattaggctttagaattaacacaacattatcgccttttttaaacaccagtacttactccgatcacaacagataaaaataataggaaaaatgatattacatttcatcaaaactaatcaacttgcaccccacttgttctgccagttccgtacatgaatccgtaaagcctgactttgaaaacaagtagtaacttaaacttcccacactaaataagccagtaatctcttgatcttgcttggctttaggcttctatattatttttgctagttttctttaacaatttttgcatgtatttgggtaaacgattgataaagtcagccgtgaattcagctatttgtgcttcactggcatgaaagacttgctttacgctggccagcattgcatcagtaatcaattgcaaggaatggctaaaagtaatgtccgccagctcatcaatcatgcaatagaacagctcgcctagcgtgcgttcatcttcatcgtcccgcttggcaactgacataagcatgtagcgagtaaaaactatggcaacatgagcggtcaaagcatcgtaagacaggccatgatattccgtacttagttttagataacttttgcaagttttgaaaaaaacctcaatatcccaacgcttgccgtagttgcggataatttcatcttcgctaagcgacatgtcggtacaaatgattgccagccaatccttgcgattggcacggtttctaacgcagacaatccgtgcatctattttagcaccgtctttgtcctggcgtccgactttgactgggattgacagcaggtagcgagaacggccgcatcgctttttacagctgcgataaatctgtttgatgtttttgcgttctccctcaaattcatatttgattttggagctaaccttaaccatggcaatcacatccagcttcctttgcttgagctggacgatttgatgtggatttgagaaccagctgtcaaacagcacgtacttggcttgatgacctgctttcatagcttggtcgattaaattaaccatcacgtctgtgcctttagtccgggcaagcatacgtctttggccagcaatggtgcgctgatcaaaaactttattttcgccaatcatattctgtagcttctgagaagacagcagcactgaattgattggcatgaaagaagctccatcagtccagcccagggtcatcatgcgaaaacctttcttgtaagtcattgatacatggtcaaaaactttggcgactaattctgttttcttgaagccggtcctagagaagtaggaatcatcgacaacaaagcaatcagcccgtttttctgaagtcaaagatcgcaagtggttattaatgatttgcgcagacagaagtgtggtgaagtggagccaattgacgtgaacgttgcgcataaaacggtaatatgagttcttggaaaaattttcttgaaaatgatccattttcagctgcatatataagctgcggtcacgaaagacattgcttaaaacgtaaagaaacaagctgaacaggctaatgcctttttccttgcggaagccacattttctcaacagcttgatcacctgaaacttcttgatgaagctgatgattgagtttgaaaatagttgttcattttgttggtcaggagatggtaaaatagacattggcacaagcctttcatgcaaataaattatgttttggtcaatataattatagcaatgaaaaggacttgtgccttttatatttgtcaaaacacgcagaatcacaatgaaacaagcaattttgcgtgtgggaagtttaagtatttagacatggttatccaacccagacaaaaaatggatgaacgtgaggcagccttaactatgttaaagaaattagcccaacaagaaaaagatttcttagtcctgatggatcgtggctatattagctttaatttaattgaaaattgcaatcgattaaaacattgccactatgttatgcgatcaaaatccggagatggtgcttttaaagaaattgtagctatgtcgaatcatgaatacgatattgacttatcatgcagagtaacttcgtcacattattattatgtcacccataaagatacagaaaagtttcttcacctgattcttcacaaaaagcatcactataaagctgttcgttcaaaaaataccagagatcaacgctgggattttgaggatatgtgtgatgttagatttagagtttgtaagtttagaatcaatccaccaggttcagacgatgagtgggaagtcctcatcaccaatttatatcgaaatgaatatcctctagctagaatgaaagagatctatcatcttcgctggggaatagaaacttcttttagggagcttaaatatgacttaagcggcatacagtttcattctaaaaaagatcaatttgtttatatggaaatatacgcccattttgcaatgtataatgccgtgagtttatcaataattgcgagctcaaaaccgtatactcagggaaaatatcaatatcaaatagattttaaaatggcctgttgtatctggcgacgatattttagtataagtgacttaaacttcccacacgcaaaattgcttgtttcattgtgattctgcgtgttttgacaaatataaaaggcacaagtccttttcattgctataattatattgaccaaaacataatttatttgcatgaaaggcttgtgccaatgtctattttaccatctcctgaccaacaaaatgaacaactattttcaaactcaatcatcagcttcatcaagaagtttcaggtgatcaagctgttgagaaaatgtggcttccgcaaggaaaaaggcattagcctgttcagcttgtttctttacgttttaagcaatgtctttcgtgaccgcagcttatatatgcagctgaaaatggatcattttcaagaaaatttttccaagaactcatattaccgttttatgcgcaacgttcacgtcaattggctccacttcaccacacttctgtctgcgcaaatcattaataaccacttgcgatctttgacttcagaaaaacgggctgattgctttgttgtcgatgattcctacttctctaggaccggcttcaagaaaacagaattagtcgccaaagtttttgaccatgtatcaatgacttacaagaaaggttttcgcatgatgaccctgggctggactgatggagcttctttcatgccaatcaattcagtgctgctgtcttctcagaagctacagaatatgattggcgaaaataaagtttttgatcagcgcaccattgctggccaaagacgtatgcttgcccggactaaaggcacagacgtgatggttaatttaatcgaccaagctatgaaagcaggtcatcaagccaagtacgtgctgtttgacagctggttctcaaatccacatcaaatcgtccagctcaagcaaaggaagctggatgtgattgccatggttaaggttagctccaaaatcaaatatgaatttgagggagaacgcaaaaacatcaaacagatttatcgcagctgtaaaaagcgatgcggccgttctcgctacctgctgtcaatcccagtcaaagtcggacgccaggacaaagacggtgctaaaatagatgcacggattgtctgcgttagaaaccgtgccaatcgcaaggattggctggcaatcatttgtaccgacatgtcgcttagcgaagatgaaattatccgcaactacggcaagcgttgggatattgaggtttttttcaaaacttgcaaaagttatctaaaactaagtacggaatatcatggcctgtcttacgatgctttgaccgctcatgttgccatagtttttactcgctacatgcttatgtcagttgccaagcgggacgatgaagatgaacgcacgctaggcgagctgttctattgcatgattgatgagctggcggacattacttttagccattccttgcaattgattactgatgcaatgctggccagcgtaaagcaagtctttcatgccagtgaagcacaaatagctgaattcacggctgactttatcaatcgtttacccaaatacatgcaaaaattgttaaagaaaactagcaaaaataatatagaagcctaaagccaagcaagatcaagagattactggcttatttagtgtgggaagtttaagtaagtgataattcagataaaaacttcacacaattactgctggatgtggcattttatttaacgcctattcgaccaggaagaaaagataaacgaaatctaaaagttaaattagtagttggctttccttatcgtctagcagcttgaactaatttaaacgactatcttaagatggcttatttgtgctatcaaaaaagacatttatcgaataaaataattcgataaatgtctcaaaaagtgtcatcagattagtcaatgtcttaacttaatgacattggacgaaaagtccccgcttttttgttagccgtgaaatttaaattggcattgattaagatgatcattaattaatccgattccctgcaagtaggaataaatgactacaggtcccacaaaggaaaaaccatcttttttcatttgtttggatatcttctgcgataggtcattagaagcgggaacgtcatcaaagctggcaatatcatgcacaattggagtaggtacaaaattttgtaaatatttggcgactgaacaatatttttgttcaattgccaaaaatgcccgagcatttttaacagcagcattaattttcattcgattacggataatgcccttgttttgcattaatgactcgatatctttatcggtcatctttgcgacttcagagatctgccaatttttgaatgcagctttaaaattgttgcgtttatgcaaaactgtggaccagcttaaacctgattggaaaagttcgagcacaagcatttcatacaaatgtgactcatctagattaagtttgcaccattcatgatcgtgatactcctgtactgcttcgtcttttgtatcgccccatggacagcgaataatttcttgattcatatttttctctctttctatgtaagtaatgttttacccatctattatttattacgcaaaaaaatgcgattattttttgagaaattatatttttatgtgcgaaataagggttttaacagctttttttgctataattaggtgtgaatttcgaggaggatcctatggaaaaattagataccatgatgttggctgatgatttagccttatcacaagataaaattttaaatggcgaacaagactttggcgctgaagctgtttacaaagtaatcgataacttgggcgttttaaataacccaatcaaggattacttcgacatgactgaagaacaatattatgaagctgaaagcgatcacaaactaactttgatcaagatggacagtaagttgactgatttgcatgatcgcattttaactaaccatgttgatggttttgttgataaggacgagatcaacttgacctacaatcatgagaatccatatgaagatgatttatacgatccaactactgattatcgtgaaattgtttacagcttgaaagttattggtgcggttcaagcaattgcagctaaggacttgcaagaagtattgtctaaagatgctgtattatcaattggacttgccgcatatgctttagcacacaacgcataaattatttgagtcggctggtaagcggccggctttttttgcttttttgaggcgaaaagatgaatttgtttaaacacataaagggaatagttgatcgaatcgttggcgccaaaaaacgctctgcaatggataaagatagtgaattgcttgatccgatgcaaaaatatactactgttggagaatatcatgttggtgccgttgatggtacgccgcatggtaaggactatgttttaaccgtttatcaagacgaagacggcgttttgcgacaagcacttagtccagagagtacaacgaaattagcaccggaatatttacgcaagtataatgcggaactaggtcattttcgtgcctttcataataagaagacagggcgccgttattgggtggaaaattacttggataatttcactacggaagtgaaaaagcatattcgcccaggcactaattcggtcaatatcggtgtaattacagatactcactttaaagataaagatagcagcgatttttatggctttaatgggctgcaacatgtgcaagaattttcttatttagatcaatctggcttgctagatttaaaagtccacttaggtgactggatcgatggctccgatgctggcctggtcagtgaaagtgaattggtcaagctgaacaagtcttttaagtcggatcaggtgccatatttgagtatcaagggtaatcatgatgaaaatgataagtttgatgaacatcatgatttaaaagcctcatttccagaaaatgaattcgaaaatattatgtggcccgatatgtaccggcaacgaggaattcattatgtttcgcgccagcacggggtggcatactttgatttagatgacgtgcgggtgatttcagttaatacgtcagatgttccatatgaattaaataaccgcgggcaaaagcgctatgacaataagattgtattggctgtgcgtgaagatcaaattgaggaaattatcgaaattttggctaattcttccaacaaaaagatcatcttcatgtcccatgccaacccaattaatcgaaaggggtctaatgcacttaagtataatggccgctctttgcatgaactgctagttgcctttaatcaacgtgaaaaaggtcgaatgcacgctagcaatggtgttccaacagaatttcgtttatcaaatgattttgattttaccaatatcaagaatgcgagaattattgcctacttctgcggacatcggcatcgtgaagaccagtatcggatcaacgggattcaatatattttgtttaactgttctgccttgatggggccaaatcattcgctaacaactaaatacaacaaaaacttagaccgaagaattgatcaaaataatgaatttgcgggttatattgtgaacgtcgatttaaaacgacaccgcattcaatcctttggctatggtgcagcttctagacgccgggtgtatttcatttagttaaggaatagtaaaggtatttggctattacaagtgtttagcttataataaaaaggttaaagtaaaaaatagtgaatattatagcaaatattaagatttagagaattgacttaggggaatttaaattatgtgcggaattgtcgcgttttatgatccaaagataaatgaaaagcaggctgtcattggcaaaatgatggccacgattaaacaccgcggacctagttccgacgggtattatactaatgacgaggttgcccttggttttagaagattatcaattattgatcttcgtgggggtagccaacctatttataatgaagataaaactagagcaattatttttaatggtgaaatttataactttaagccattaagagaagaattaattaaagcaggccatgattttactactaaggctgatacagaagtcttacttcatggttatgaagaatggggcatggatggcttgcttaagcgtgtacgtgggatgttcgccttcttaatttgggatgacaacaacaagaccctttatggtgcacgtgacttctttggcattaagccaatgtactacagtaatcaaaatggccatttgttggttggttcagaattaaagagctttttggaatttccaaagttcaagcgggaattaaatgttgaagcagttaagccatacttgatgaatcaatacaatgacctagaagaaaccttctttaagggcgtttaccgcttcccagcgggccattggtttgaatacaaagatggtgaaatgaagacccatcaatattgggatgctgaatataaagaaaatagcctttcctttgaagaaactttgcaaaagatcaacgaagatttgaaagaaacggttgatttgtatagaaacgctgatgttaaggttggtgctttcttatcagaaggaatcgactcttcatacttgactagtttgcttaacccagatgacgttttctcagtaagttttgatgattcaacttatgatgaagcttctaaggctaaggcattagcagatattaatcactggaagttcttcagcgataaggttgatgctgatgaagcaatgcgtgacttcccagaaatgcaataccacatggatgaaccagatgctaatccgtcaatcattccactctggtacttgtgtaaactagctcgtaagcatgttactgttgctctttcaggtgaaggcgctgatgaattgtttgctggttatgtgaactacgggatgcatacgcataacgacattattaaggtctttacttcagaattgaaaaagttgcctgagaagaagcgggttaaattggcacacaagattaagagaatgcctaatttcccaggtaaagttcacatgtacaccaatttagctgaaccgagtgaattttatgtcggtcaatcggttatctatgacatggattacccaactatctttacttctaaagatgctaatagcattttacagccaacgtatcgcaataaattgactgttaacggcatttaccaaaaagactttaagaaagtaaagggagtcgataatgttaagcagatgcaatacattgacttgcaccactttatgcttaacgatattgaacaaaaagctgataagatttcgatggcccattcacttgaagttcgtgttccttacctcgacaagaagattgcggaattggctaactctatcccaaccaagtacttggttaaccgtcatgataccaagtatgctttgcgtaaggcttcagaaaaagttttaccagatgagtgggctaagagacctaagcttggcttcccaactccaattaagcaatggttgaaggaaccacgtttttacaaacaagttcatgctctttttgaagaagaatttgtcaacgatatttttgaccaaaagaagattatcaagttacttgacgacaactatgaaggtgatggctcacatagacgtcaaatctgggctatctataccttccttgtttggtacaagttgttctttgttgattacgaaaacacagttaagaaatatcaacacgtgcaacctgaagttgctaagctaatttcacagggtaaattactataattctagggagattttttgaggatgagtaaaaaatttacgccgatcttactcggtagtgatatcaacgtgtatggtatggcacgttcatttaatgaagcatatggcattaaagtgaaggccttagctgacgttcaacttgctgctactcgttattcaagcattgtggacgttgaattgcatcatggctttagtagcgatcctacttttatggacgtgatgcacaaaaagatggaagaatacaagaatcacgaggagccagttatcttgattgcttgtggtgatggctatgctgagttgctttctaagcaccaagatgaattgaaaaaggtctttatcgttccttacataaaatatgacttacttgaaaaattaatctctaaggaaggcttttatgaaattgcggaagaatatggcttgccttatcctaagactaagatcattacgatggatgactacaagtcaggtaagtacgaggatgtcccatttgatttcccagtggaattaaagccggaagatccagtttcatggttgaagtgtcaatttgaaggtcggaagaagacttttgccattcaagataaggctgaatttaaggatatcgtaactaagatttatactcatggctacaacgctgaccttattttgcaagactttattcctggtgatgattctaacatgcggaccttgaatgcttatgttgataagaaccaccaagtaaaaatgatgtgtttagggcacccattattggaagacccaaccccacaatcaattggtaattacatggcgattttgcctgagtacaatgaaaaattgtacgaagaagtacaacaattccttgaaaagttgaactacactggtatggccaactttgatatcaaatatgatccacgtgatggtgaattcaagttcttcgaaatcaacttacgtcagggacgttctagcttctacgtaactttgaacggttacaacttggctaaatggtacattgatgactatgttgaagatgccttgaaagataaggaaacagtttatggtaataagcttgaatctaaatacaagctttggttaggcgtgcctaagaagatattcaataattatgcttatgacaacgactataagacgactgctgacgaacttattcgtgagggccgctatggtactactgtcttttatgacaaggatagaaacttcaagcgctggttattgatgaagtacatgttccataactacttcaaacgttacaagacttactatgaagttaataagggtaagatctttgacgaagaaaataaaaaattaaacaaatagtttaaattgagaggtaaaaaatgcctctctttttttctaaaaaattttagctgaatcatttcccaatttaatggtcttttggttaatacaagatatattcatctatatttgaacacaatacaagatgttgtgttttatactatgataaagacacgagatttggagtgattgaaatgctaaaagaagaatttaaccaacaaaatgtaacaaaatttaatacgcctaaaacttttgttaaacgtgatgggtcaaagtatccgttcgcaatttttaaactcaacatggttttgcataacctagatttagataatgtagcacctgctgtaattgaaaaaattgtggctaaactagatgctgctgatgaagtaaatgcacaagatgtagcagttgcttttagagatagcctaaatgagttgggttatttggatgaagctaaagcttatgtgcaataccgcaagcacgatgaagaggaatggattaaacaaaccgatactcgtgcacggttaaagcgaatggttaatggtgacccaacgattgttaacgagaatgccaacaaagatagtgaggtcttcagtactcaacgtgatttaactgccgggaccgttggtaaaacagttggtttgaccatgatgcctgagcacattgctaaagcccacttgcgcggtgatattcactggcatgacttggattacacaccactttcaccaatgactaactgctgtttgattgactttaaggatatgctaactaatggtttcaagattggaaatgcctatatgactagtcctaactcaatcaatgtggctacacatcaagttacgcaaattattactaatgtagcttctagtcaatatggtggctgttcttttgatcgagctgatgaagtgttagctccttttgcagagaaaaactaccaaaagcatttaaaggatgctggcaagttcattgatgatcctgaaaagctggaagaatatgctaagagtcaaactaagaaggacatttacgatgccatgcaaggcttggaatatgagattaataccatgttctctagccaagggcaaacgccatttactactttaggttttggtttaggtacttcttggattgaaaaagaaattcaaaaagatatcttgcgtatcagaattaaaggattgggtagagaacgcagaaccgcaattttccctaaattagttttcaccattaagaagggcttgaacttacatccaggggaccctaactacgatgttaaacaactggctattcaatgttcaactaagcggatgtatccagacgttttaatgtatgatacgatcaagaaaattacaggttctttcaaggttccaatgggctgtcgttcattcttacaaggctggaaggatgaaaatggtaaggaagttaactcgggcagaatgaacttgggtgttgtaactgttaacttgccaagaattgccatggagagtcatggcgataagaagttattctgggaaatcttcaatactagaatgcggacttgccaccaagctttagcctttaagggtagacgtgcaattcaagctaagcccgaaaatgcgccaattatgtatcaatatggcgtctttggtaaacgacttaagccaggtgatgatgttaacgagcttttcaaaaatggtcgagctacgatttcgttaggctacatcggtttgtacgaagtagggacagtcttttatggccctgattgggaacacaatgaagaagcacatgattttacaattgagatcgtgaagaaaatgcatgacttgtgtgctaagtgggaaaaagaggacccatatcattggcattacagtttgtactcaactcctagtgaaagtctaactgatcgcttctgccggctcgatacggcaaagtttggcaaggtgaaggacatcactgataaggaatactacactaattcgttccactatgatgttcgtaagcacccaaccccatttgaaaagttgacttttgaagcaccatatccatattatgctgcaggtggttttatccattattgtgagtaccctaacttgaagcaaaatccagcagcccttgaggcagtttgggattgggcttatgacaaggtaggctatctaggaactaatacgccaattgataaatgttataagtgcggttttgctggtgaattcaagtctactgccaagggttttgaatgtcctaagtgtggtaatcatgatcctgctacttgtgattgtgtcaagcgaacttgtggctacttgggcaacccattgaagcggccaatggttcacggtcgtcatgaagaaatcgtgcaccgggttaagcatatggactttggcatggaagatagtttagctaccgaagaagaagtaaaaaaaggtgagtactaatgcctgaaaaagataaaaacactcaagaaggaccagatatccggagtaatttgatcaaggttaatatgggtggggataccatgtttgtggatcctgaccaatataagccacagttagatcaccaacgtgagttaaaaagaatgcaccgcaagccgaaaaatccaaaaccacaagagtggaagactgaggattattctaaacataaaattgcggattataagccatttaactttgttgatggtgaaggcgttagatgtagtctttatgtttcaggctgtttgttcgattgccctggttgctataatttagcagcccaaaactttaattatggttttccatatacgcaagaattggaagaccgcattattaaagacttgggccagccatacgtgcagggattaaccttactaggcggagagccattcttgaatacttgggtttgtttaagaattattaaccgaattcgaaaagaatttggccacagtaaggacatctggtcctggtctggatatacttgggatgaattgcaaaaagaaacacctgataaaaaggaaatgttgtctaagatagatattctagttgatggccgctttatgaatgatttaaaggatttaaccctgcaattcagaggttctagtaaccaacgaattattgatgtgccaaagtcgatgaaggcaggcaaggttgtcatctgggataaattgcaaaaataagataaactaaagtccggaatgattttctggacttttttgctaggtgaaaaaatggaagaaaaaaatattaaacaagttgatcaaatcatgacggccttgacccaagtgattgatccagaattacaagttgatgtagtaaatcttggtctgatttatggcatcgatatcgaaggagataaggcaaccattaagatgactttaacaattatgggttgccctttatctgattatttggaacaacatattcaaaaagctgttctttcagttgctggaattaagtcttgtgacattaagctggtctggtatcccgtctggacgacagagcgtctttctagtgcagctaaaaagcaattaggtgtaactaaccatgatgatcaaattaagcaggagaaagccaccaaagagaagattatcgacttttcagtaccgatcaagaaaatggcagatgaataccctgactttgttcaaattatgtacgattgtggttttactagaattaaaattcctggattgcttaaaacggtggggcgtgtgatgaccattccattgggagctcaggcaatgaaacttgatttggctaaagtgaaaaaagcatttgaagataaaggatacaaggtaatcaatgactgataaaaaaagacaggacgcaatcctgaaaattttgcattatattcaaaacggcggcgattttgcgaccgcaaagaagatgtttcaagaagaattcgatcaggttgatgtggccgaaattacagcggcagagcgcgaattaatcaagcaggggttaaacccagcagagattcaatacctgtgtaatgtgcatgccgatgtctttaagggtaatatcaaggagaatgcggtaaatcctgattttgctactccggggcacccggtgcatacgattaagctggaaaatatggtactgaaatcattggttaatgacgcactcttgccagatttgaaaaagtatcaagcaggtcaagatacactggataaaatcagaaaagaattgagtgatttggcaacaatcgataagcattaccgacgtaaggagacctcgctttttccattaatgaataaatatggcattacagctccgcccgaagtgatgtggggcgttgatgatgatattcgcgatttaattggggatgcaagcaagattgctggtgaggagcatccagataaagatcagttggctgaggcaattaaaaaggcgagtcatgaagtgcttgagatgatctttaaagaggagagcattatgattccgatgattgacgaggtagctgatcaagatgattggtacaacgttaaacgcgaagagagtcagattggctataccctgattcgcaagccaatgaattggaagccaaaggaagctaaaaaagaagcagggcctatttctgttagcaatctttcatccttcctcattaattttgaagaaggaaggttaaatttagagcagttaaatgcaattttggatatgttgccatttgcattgacctttattgatgaacacgataaggtagcttattttggcggcggtgctgagatttatccgcactcgcgcaatgctattggcaatgacgtattctcgtgtcatactgctaaaagtagaccgttaattaaaaagatttttgcgcaatttcattcaggtgaagttgacaagtatgagtttcactttactccacacaagatgaagcgctgcttatacctacgctattatgcagtacgtgataaaaatggaaagtatctgggttgtcttgaggtagcacaagatgtgacagaaattagaagctggactgaagaaaagaaaaaaatttaacttgttgggctgtgttctagtaagggatgcagctttttcttttgccctcgtgcaaaaaatcacaattcttgctagactagattgagagaatgattaaaaagaagggaagagagaaaatgcgcacagcacatggaaaacaaccagctgatgaaatcaaattgcattggcttcttctaggccaattactaacgtggttgggttccagctttatttggccatttacttcagtttacctgcacgaccatcttggcgtttcactagctttagtgggtgtcgttttgctgttcaactgtgttgcaaatatgattgggtcatttatttcaggctggtgctatgaccatatggatccatatgtcttgctgattgtgggggctgctttagatgcggctgtcttgtttggcatggctttgaatcatagttggccgttatattggctctggatgactttaactggctttttgggtggctggaatggagcattgattaactcgattgctactagtattaaatctaagccaggtcgttatgtcttcaatatgatctactttgctcaaaatgttggggtcgtttgtgggacattagcagtaggttatctttatgattattcagtgactttattatttgtcattgctggtcttttattcgttggcgtttgcgttaacgcaattattaattatcggccaatgattcagttccacaaggagcgtttggctaacaaaggcgaatcaaagaagaaggcctttgagccgatgccaaaatacaatctgattatgtcaattggcttttttgttacgatcgctgtaatttggttgatgtacatgaactgggaatcaaacttgtctgtctacatggtttctttgggcattccttttcatctgtatagtttgttatggaccatcaatgccggaattattgtcatcgtgcaagctatcttaagtcgttttactatctttaagagcttatttagacaaattttatttggcactttgatgtttgcaatttcttttgttactttgatttttgccaaagattttgcacatttcgccttatccatggttatcttaactttaggcgaagcaaccgcaatgccgtcgattccaacttatgtcaatgatctgtcgcccgattctagtaagggcaagtatcaaggcttaaccttgtctgcatcgtcaattggtcgagctctaggtccattatttggtggtttaatcattgaagatttcggctatattcaattctttgctgttgctgcaattggtatctttttgcttttagtcatgcttattccaatgcatgcgaaactacagaaaaaactaaaattatttgtaaaataaaaacaacctgaattgtcaaattaagtgcaacagttaggttatgaagagatatattgcttgaagagttcctctgctgtgtgatattggaggattcggcgatatttgtggttaatggcatcagttgcctgttgaacataagcttttgacttgtctttcatgctcttgcccttagggaagaattgacgcaaaagaccattgcagttctcattggtgcccctttcccatggagaatatgggtgagcaaagtaaatctggcagcccttgatcttggtcatatccgcaaactcagagccattgtcaaacgtgattgatttaaaccaggcaggatgtctgtcaatctccttttgaagcagcctttggcatgtgcttgcccgatagtcaggaatcttgataactacttcaaagcgtgtggttctttcagtcaaagtcattaaagcaggctgattcttgcgtctgacgcctttaaccagatctccttcccagtgcagcggagcttttctgtcttcaacctccttaggacgctgttcaatggaattgccaagatgcttcttgtgcaaagcgtgaccgccatggctgtgatgacgcttgttcctgcgtcttttgagcttcataggcagatcaatattgcttatgtccagcaagccctgatcaatatagcgatagacggttggtgtgctgggacaagggtagcctggcatagtcctttggaattcaccaacgaactcatcgatgctggtggcatcaaatttagctttaaagcgtctggagagcattctcaaaaagacagcataatgcttcaatggattgcgctgatagcagtttttgcgacgcttctcataataaatctgtgcagtatcagcgtaatagtgctcatacaataaatagctgctgtctctttgcaggacgcttccgcgtttgatttcgcgactgattgtcgacttatggcagccaacttcttgagcgataacagtacgggaagttatgccggaatccagcattgcttgaatttgtccacgttgtacgctggttaattgatgatagtgcttagaaatgctagaatttgaattggtcatgaagatcttcctttcttgatttttcgtcacttcaagtttaggtcttcatggcctttttgtttaacacttagtgttgcacttcaattttaaatccgggaaaataaaaacaacatgatagcgttaatttttttataatgctatcatgtctttatatgaaaaatttttccactagggaggtaatttaatgtattttaacgtacgcggcggtgctggtgacattactaaggctaatacttcagcgcgtctacaagataatttatatttggccgttaactcagaatggttggaaaaggctaaaattccatctgatcgttcaagaaccagttcatttgatgggatcgatcttaatattgaaaagaacttgatgcaagactttgcagattttgctgctggtaagaaggaactgcctactgtgcctaacttcaagaaggcagttgagctttacaaggttgctaaaaactttgacaagcgaaatgcggatggtgccgcacctattcaggcagatttgcacgaaattttagacttgcgcaacttcgctgactttaacttgaaggcagcagatttttacaagaatggttttgccgttccatttgctttcagtgttgaagcagatatgaagaatactaagattcactcattgaattttggtggtccaagtactttcttgccagatacgactacttacaagactccagctgctgagaagttattggatgttttgaaaaagcaatctattaagttgttaacaatggccggacttgatgaaaaggacgcagaagattacgctgacttggcaattaagtatgacgctaagattgctaaggttgttaagtcaactgaagaatgggcagattacccagcaacttataatccagtttcattgactgactttgaagcaaaattcgattccttcaagatggattacttcttgggcggattatttaccaagaagccagaacggataatttcaactgaaccacgttacttagatcacgcggaagaattgttgaatgaagaaaactttgctgaaattaaggcttggatgctggttaagtttattaatggcgtagcttacagcttgtcacaagatttccgtgaagctgcctttccatttagtcaagctttgtcaggccaacctgagctttcaagtggcgttaagcaggcatatcatattactaatggtgacttcggcgaagtagtaggtgtctactatggtcaaacttactttggcgcagaagctaaagcagacgtgactgatatgattcacaagatgcttgatgtttatgaaaagagaattcgtgaaaattcatggctttctcaagcaactaaggataaggcaatcgttaagttgcgcgctttgatcttgaagatcggttatccagacaagattgaagaaatctatgaccgtttacaagttgatccaactgctagcctttatgaaaatgaagtgcaatttggtcgggaacaaattaagtacaatcttgagaaattgtaccaagatgttgaccgtacggtatggttgatgccaggtgatatggttaatgcatgttacgacccacaaagaaatgatttaactttcccagctgcaattttgcaaaaaccattctatgacttgaaacaaagtcgtgctactaattatggtggaatcggcgttgttattgcacacgaagtatcacatgcctttgacaataacggtgctcaattcgatgagtttggtaacatgaagaattggtggactgatgaagattttgctgaattcaagaagagaacgcaagctgaaatcgacttgtttgatggtattgaatatggccctgtaaccttgaacggtaagcaaatcgtatcagaaaacattgccgatcaaggtggtttgactgctgctgttgaagctaacaagggtgaaggtggcgacaagaaggcaatgcaagaattgtttgaaaactttgctcgtgtttggacaactaagcaattgccagaatcaattaagacgcaagtatctatcgacgttcacgcaccaggtccagaacgtgctaacgtgcaatcacaatgccaagaagaattctataaggcatttgatgtgaccgaaaacgatggcatgtggcttgctcctgaaaagagagtagtaatttggtaagtaacttttcttaatatcgagtatgaaaaattagctaaattacatataagctcctataacaagaatgactacagtgctgctactacactgcagccctttataacttattacccattaataaattttttgcactaaaaagtgtctgggaaaaaactaagtctcagatcatgaaaaaagaacgttgaatttttgtttcaacgctctttttgtatacttttagctccagccttgatattattaaatcatcacaaaataaaaaaggtggaaactaacatgtacaagaattatatcacaggtcaaactgctttaacacttaatctagattttgccattccggccaatcatttggctaatgtcatcagctggtttgtagattcaattccagaagatgttttagtaggcaagactgctaaaacgggccgcccagcctatcatccagccatgatgctcaaaatactgctttttgcttactccagaagagttttttctggcagaaagattgagttgatgctggaagaaaatctgccaatgatgatcttggctgaccagcaaaagatttcatatcatactatcaataattttagatcaagcagccatgccaatgaactgattaaaaagagctttatctacttcactaacctgttagaagatgaaggcttaatcaatgaaggtgctgcttttatcgatggtactaagattgaagctgatgctaaccgctatacatttgtctggcgcaaagcggttgaaaagtatcatgaaaagctgaaaggccaggcagttgaactttatgatgaattgattactaaagaagtagtcaaagaaatggaaaaagaaaaagttcaaactagtcaggggctaaaggaattagctcaagaaactgaagcagaaattaacaagctgactaaagagattgagcaggaaaacaaagccattcctggcggttcacctcgaaaagccaagcgacgtggactaaaaaagattctgcaccggctaagaaaagattatgtgccaagaatgcaaaaatatgaagaagccgaagagatctttgccggacgcaacagttattccaaaacagatcatgacgccacctttatgcatatgaaggaagaccacatgaaaaatggtcaattaaagcctggctacaatattcaagcagtcacgaccgatcaatatgtagttgattatgccatctttcctaatccgacagatttcaaaactttggagccggttttggatcaaatgaccgtgttggacaagtttgacaaaatcgtcgccgatgctggctatggcagtgaatacaattattcgatgctggaggaaaaatatccagacaagaagtactttattccctacactatgtatgaaaaagaacagaccaaaaagtataagaatgatccaactaagctaatcaactggtactacaatgaaaaagatgattattacattgatcatcatggcgtcagattcaatttcaaatattacagccagcgcaaggatcgttctactggtcaggtccgtgattttaaggtttatgaggcagacgagttccagctaacgccagaattggaacaattggctaaaacagctagcggccgccagcgccaagttcgctataatcctaactggcaatatttaaaagaaaaagcaaaagaagttctccaaagcgaagaaggcagacacatctatggcatgagaaaatatgatgtagagccagttttcggacatttgaagaacgtatttggcatgcgcagaacgcacctgcgaggtaaagagaaggtcgaaaccgatatcggaattgcctttatgatgatgaatttgaacaaatattgtcaaagaaggtggctgaagggccgatttttattgttaaaaattttaaagagaacaaaaaaacgatcaagattcttaaaaaaggaaatcttgatcgtttttattcatctggaagctagttttttcccagacactttttagtttagtaattatttagttttagctgtcgagtaatcctttggcttaatccgcttaatgtaagatggatttggtcgacccaggattaatggtacacgctcgattacggtatcggcgtattctaagccgaaccaggaagctgggttagaagacaagttttgcaagcgaacccgcgcttccacaagccatttttcatagccaaccaattgtgtttgtggactgatgacgtcgttaacaataacgaatgagaagtcacctacgtcacgacctgggctggtggtgtattcctgtggttgtggctcaatcgtaccgtcggcgatcaagtcatgaacgatctgacgaatgtagacattcacactagtttgcttcttaaagccgaggtagagctgaatgttaattacgttcttcgtaccgtaagtgttaacagcatattcagcggtaaatggctcgttagtaacattgacagtgacaaaccagtaagcctttgctcgtttaggtcttttatccaaaattgagtacaggatttcacgtttgatgaacttattgtacttaacgttggccatgtaaaccaagttggtagcataagttgggtaattttcatcgtgacttaagttcgttaacatgtcggtatattcatctaagcgaacgtaagcattgcgagcttcacgcttgtcacgaaccttgttgccgtaataccaaacatacattatgaagccgatagcaccagcgatgaagagtgaaacgtaaccaccatgagtaaatttagtcaaacttgaaatcataaacatgatgtcaaggacaccgaagaagatcaagaagatccagttccaaacagtgttgactttcttcattactaaccattcataaagcaggatggtagtcattaacattgaaattgtaatggacagaccataagctgcttccatgtgagctgaagtttggaaatataagacgattgcgatagtagcaacacagatacccttgttaatggaaggaatataaatttgtcctttttcgttagatgggtagttgatgttcattcttggcaagaacttcaagcctgaagcttctgcaactaaagtgaatgaaccggtaattagggcctgagaagcaataacagcagcaatagtagccaaaatgatggcaaacaatctgatgttagctgggatcatttcaaagaatggattgagcacaccgccgtctgcaggacggtaagttgggttgttcaaaatccaaacgccttgaccaaagtagttgagtgacaagcaaacaaaaacaaatggccaagaaccaataatattgcttttaccaacgtgaccaacgtctgaatataaggcttcggcaccagtcgtagctaggaaaattgaccctaaaataaaaattccagccttattatatggactgactaataatctaatagcgtaaattggattgattgcttgcaagattgaccagtcaccgaccatgttcattacgcccattacacccaaaaaagtgaaccaaaggaacatgattgggccgaaggctttaccaatgatactagttcccattttttggatagaaaacagaactagcagaatgactacagtgatggcaataaccatgttttgagtagaaacgggtacattgccgccaaagttcagtcctttcagtccttcaatcgcagttgtaactgtaactgctggagttaaagtaccatcggccaaaatagcggctccaccaattagcgctggtagaactaaccatttagctcgttttctaaccaatgtgtataaggcaaaaatcccaccttctccgtggttagttgccttgagggcaataattacggtttgtaaggtagttagtagcgttacagtccaaagaaccaatgaaattgatccaatgataaagtcacgatttacattaccaatgccgccgttgccttcgacaattgatttcataacataaagcggactagtaccgatatcgccgtaaacaataccgatggcgattagtaagccggccgcgctcatgcgtttagctttattattcattatctcgttatctcccacaacaaaattgtagttttaataaaaaaagaaaatgccacgatgacattttcccttattgtacctattttcgtctatttcgctggacaatgcaagtgagatttgtcagaaattgaatctagaatttggtgatgataaagttaatgcattataataaaaaatatgcagtaaaaaagctcccatacagggagcctttttgatataaattatgaaagtgatgaaggaatcttagtacgttggtcttcgtcccatttttcccatgcttcataagtaagcatttcttctggcttaacaccagtcttttcttccatggccttaagcaagtccttaaagttgtagtcgtggtattgtaacacatgatcaaccaacttcttgcgtgggaagtggatgttgtttaaaacatagcgattgatatcaaccatgttatgattttcatcgtaaaggttgataacttcaagatcgtcttcatcgaattcagcgatgtagaagttagcgaagacctttaagtaatcaggttgttctttgaattcttcctgtggcatagtagtcttgttagcttctggcattacgactttaaagtcgtcgttttcttcattttctttatcagcttgagcttgagcgttcttttcttcttcagtcaaagttgttacccctttatttataaataaatagatacaaagtcaataataattttacagacttctacaaataaaagcaaatagaagtggttgagagatgcaaaagtatagaagtcagttttgattagtaaaatggagtaaaatgaagtaaaatataaatgtaaaaagtaaaatgaagtaaaatgaggaaaaatatgtataatgaaaatccttttgatgctgaatttggcgggatcccagagctatatcttgattttaatgatgatgcagttaaatttgctcaaagagcccatcgtctcaagaaacatccaacttattctctctttattacaggggtacgaggttcaggaaaaacagtttttatgaacaaagtgggtaaagaactaaaaaaatataaagatactatggtagtcactttgcacaattctgatgatctttttcgaatgatgtatatcaagctagtgcctatgctagataaaatcaaaaaatggacgccatcaatttctattaaagttccttttgtatcagtagatttcactgaagcaaatgaaaagcatgatgaaatatattataaagtagaaattaacaagattcttaaagctttgaacaaagtggggattcgtgttgcattttgtattgatgaagtgtcaaatacacccacaattcaaaaattggctgaggaattcaacgactggagcctaaataactatcaagtttcagtgattatgaccggactattaagtgaagtggcggaactatcaggcacacataatttaaccttcttggttcgggcggatagatttcacgtctctaaactatttgcgtcgtcaattgccagaacttacatggatgtattagacataacagctaagcaagcagaaattttggcagatatgtcaaaaggctatgcttatgcatttcaattgatcggagatttgatgtatgaaaatttaagtcaaaagatgacgtttgaaaaagctttggaatatactaaacttagattccgtgatgtacttttcaaccaagcgtatgatgtaattgctcatgaattaacggatgtggattttcaatttttgtacgctatggcgcaagataatagtattagttcaattattaggactatgcaaaaaagtaagcagtatgttaatagctatcgtgcaaaattaattaaatatgatctaattaagccaataattaggggaaaggtcggctttaccttacctttgtttagagatttcattcaagcaaagtatgatgagcttaactggggctagaatttattgaaaaaattcggcagaaaatcacagaaatgaacgcagatccagtttggagggatactattatggactatgagactaagctagctgaagagcgtgaatacggtgaagaaaaaggaattttaagtgcaattaagaaaattatttatcgtaaccggagctatggtgtatcagattccaaaactttggaggatctgacagaagactaccatgattctgtttcccgggatcaaattgaacaaatgatgaaagaagcctaggtctaatgaaaatagccgctgctcaatgtgagtaacggctatttttttacttgttatcatcagcagcagagctggaacttacggcagatgattgatcgttgcttgaggaagccgcgctggattggttgatggatgataatttaagtaattattcttttgaaaaaatatttcttacttgttggagtaaattatcgaattctgttgattcttttatgtggccgattatttttccatgacgggcaatgaaatcatacgatagcatttgaaataataatgcatctccatttgtgtgactagcataatctagcacatagaatctaaatggatcatctgtaatatggttatgagtaattgctagtcctattactaatccagactttttagtgtaagcatgtctgctcactactaaatagcgtctacgaatatttcctttttcagaatcatgtccacccatttcgtgaccagcatgtggttcagcatcgatcattattatgtcaccttgatggacatcaatccttctcatttgctagttcctttccgacaggtttgacttctctaggattgtatcctaattcttggtattctcgctttatttcagtatcataatcataatcgtcataagcggggtctgaccataaatcataattgtttttagcaattcttttgtatacaatatcaccgtttttatttacatcaacagagaattctgtattaagtggaactttgatagtacttggaatggtaagcactattgaatttccttgttttctagccttgactaccataataagccctccttatgctaaaaatattttattatttaagtatatactgtgaatacagtgagcacaaataaaaggagccacaaattggctcctttttcgttgtgtgtcgggcatggcatttgtctagtctagtgaaagtctagatcacgggtagttgtcgccaagtgtagcgaaccacaagccgttagcggtgacgctatgggtgaaggaagtggctagcgagttttccgagcctacgtacagaaacctggtcaggccaaatggtggatgagactgcagcacaagttaaagtccaaaggacaaccgtaaaaccaagacggtaaaccagggggcagtggaaaattaaagatgaatgtcttaccccgagagatctcgtggacaggtgaaaccgagtaagctttaatatcagcgatcgtaagcctggtcgaaaaaggttaatcgcgagaagtcagctgaggtcgtagtagtgctgaaggttttgtaatgaaactggagcgaagggcctaatgtttgtaagagcatatctcgctataagcaatgttcagacagtccggataagaggatagcctagcacaaagagaacgtaactctttgatggtgaaagcaattgggacaattctgaataaatttacaagtagaaatggagatatcacgagatggaactaattgaacagattttaagtcaaaataatctcaaggaagcaatcaggagagtcaaaatcaataagggagcgcctggtgtagacaggagaacagttgatgagcttgatagctattttaaaaagcatcaagtagaaataaaggacgccatcatgaagatgaagtatcgtccgcaagctgttcgcagagtctacattcctaaagctaatggtaagaaacgtcctttaggaatacccacggttgttgaccgagtaatccagcaggctattgcccaagtattaatgaagatctatgatcctcattttagtgagcatagctatggctttagacctggacgcagtgctcatgacgctattgaacaagtcttggaatatttaaacgaaggctatcaatgggttgttgacctggatattgagaaatactttgacacggtaaatcatgataaattaatttcaataattagagagcaagtaaatgacaaaaccaccctccatttaattcgagcctttcttaaagctggagtaatggaagatggttgggttaagcctaataaactaggtgtaccacaaggcggccctctttcaccaattctatccaatatctatttagataaaatggataaagaattggaacaaagaggcctgcgctttgtccgctatgccgatgactgcaatatctttgtcaaaagcggtaaatcagccaaacgtgtgatgaattcaatttcatcatggctagaaagaaagctattcctaaaggtcaacgcaaccaaaaccaaagttgtacgaccaaccaagagcaactttcttggctttaccttctggaaaagtggcgaatactggcaagcaaagccaggagatgaccgcaaaatcaagctttatgacaagatgagagaacttctctgtcgcagaaaagcagctgctcagcctctattactagtctttactaagataaatcaagtagttagaggctgggtcaattactttagagttggcgacatgaaatattttctaattaagttcagtcaatggctgcgtcataaagtacgggtggtaatcattaaacaatggaaactaccaaaacgaatatacattaacttaatgcggattaacaaggcactaaagtgcaattttagtgatgaagatattcataaagtagctaatacgcgcttaggttggtataaaagaagtacgggtcatgtcattaactttctgcttagcccaaaagtattgggcataagcaaagcggatcgcccaggcttggtcgatccgctagaatattatttatctcgtaaataatcacaaacgtagcgccggatacggaaccgtacgtccggtgcaatgagaggggcgagttataaaactccctctactctattgcttacttgttatcatcagcagcagagctggaacttacggcagatgattgatcgttgcttgaggaagccgcgctggattggctgctggatgattgttcctgctggtgatcgcttgaagaagatgaagaacttgattgatcatctgacttcttgtttgatgagctggacttcttggactgctctttatccttatcagatgaggattttgcagaatcatcctgactagaattatctttgttagaatctgcatcagaattattagatttttgctggtcaggatcagcgttctttttattggaattattataggaagtattattgtgcgtttgagtgttggcatggctaatgtaagcaccggcgccacctccacctaagatgaacatcgcagcaataacaccccaaaagactaatttcttcatattaagacaactctcccttatcttagaaaaaatattaacgaatttgagccaattggtgactttgaatcgttagttatagtgtaagacatctggccggcaggttgattacaaaatactcaattttaactaattattaagaggtagaagaaaaatatgaattacgaattaactgaacaatcaatccaatatgtatttggcaacaagaagtataagaatgggcaaaagacccgcaatttgaagaatgtgaagactggcgctaaggcagatgagttgcaaaaggtgggtcaagcaattgctagtttgcaagaagactcacttgatgaagcatacttagtgcagaagtcacgtcttgtaccagcagctgaataaattaacgaacatatttaggaaataaggagaaaaaatgatggctaaaactactaagactatgaagttaactttcttgaacggagaaaagaagaaaattagtattacgttgggggatgcagtcgataatctaactgcggatcaagtacgcggtgcgatgaatacgattgcggaagccaatgcattcgagaaagacggtgttgcatattatcacactcctcaatcagctgcatacattgaacgcactattactgatatctttaatgattcagcagaatctgcagttgagcctgcagctaagcaagactaatctggacttgcttgaccaactaattagcttggtcaaaaggctcaggagaaaatatcgcaagatgtagagttcacacttagacctttaacagaaatcgtatagtaatattactttttcaattgattttgttacatcgttgtaaaatttaagaaaaagtaaagaaacagtaaagcgggcgcatgctcgctttttcttgttgtgtctaggattacggcattttgttattttagatttgtgtgaatggtattgggatagggaataggtgaattattacaaaagcaagattatagtcaatttaacttgctattttttcaagaggttagtacaatatgaatcgtggtaagtaataggacgtgcttcaggcgtgtcgcctgtacgcatgctgatccttcaacaatgactactacctcatgagagttataaactcatggatcttgctttgaagaattttgtacattataggctccctacatgctgaacctatggcctattacattttttatatttcaaggaggaaaagaccacatgaagaaaaatttaagaattgttagcgctgctgctgctgctttattagctgttgctcctgtcgctgcttcagctgtttctgttaacgctgctgcaaccactaccaacacagtatacactgtaattaatgctgatggtaccgcaatcaacactccagctgatgcaaaatacgatgttgatgtaacacctaaccttactgctattgcagcttctactgtaaatggacaaactattaacggtagcattactggtaacattactgctagttacaatggccaatcatacactggtactttagatactaagaatggtaaagtttctgttattgattcaaagggtagaccagttattcattttggaaagcttgctaatggtttatatactgttactgtaaagggtgtatcattcaactttggtactgctaacgcaaacaatactatcactcttggctcaaagaacagcaatgttaagttctcaactgatgagggtaagagctttgctaacactaaaaaggttgaacttgaccaagatggtactttaaagaatcctatttcaattaaagtttcaaacgttaatgcacttgacctttcaaatactaacggtattaacttctacaacgcttcaaacggttcacaagtaactaagggttcagttaatgtaactgctagtgttaacggtcgtttgaacgtttcaactgttgctagtgaaatcttaaagaactttgctgcttaccaagtttcaaatggtaaggctgtatcacaaatgccagaccaaaaggctgtagttgctgatgttaatgctgctttaaaggctgctaatattccagttgacaatggttggtttgctgctccaacttcattctcagttaatgtaaaggtaacttcatcaattaatggtgttgacgctactttacctgtaaccgttaatgttgctaacggcaaggacactactgtaccaaggcaaagcaagactattatgcacaacgcttacttctacgacaagaacgctaagcgtgttggtactgacaagcttacccgttacaagtcagtaactgttgctatgaacactactactatcaaaggtaaggcttactacgaagtaatcgaaaacggtaaggctactggcaagttcatcaacgcagacaacattactggtactaagcgtactttgaagcacaacgcatacgtttacaagacttcaaagaagcgtgctaacaaggttaccttgaagaagggtactgaagtaattacttacggtggtacttacacattcaagaacggcaagcaatactacaagatcggtgacaacactgaaaagacttacgtaaaggcttcaaacttttaattaagtctatgtagtagataagataaaacgaggcaatttgcctcgtttttctttttgctctagaaaaaggtaccgcttgttgcgacaccctcggaaaatattattgttataacctagctctgcttcagaaattcttctaactgtttatcagagaacacattgccatacttttgctttaattgttgcaggatttgttggctagtgcagccaacatctttcaaagaagcgactaatgtaagtgcacctgttttaaggcctttcttttcaccaacttgctcgcgttcaagcattctagtttcaaaatccataatagtgtccctccattctggatcggcattcattgattcaatgcgtttttgtgccttatcaaaaagcttgtcaccatgtactggctaattttaaatccaactctataaaccatttgttataataaacgttgacgtttatgccttccaatatcagatctcgcattgggaggtgaacacatgctagatttgtttcactttttattaggctctatcttagcgccacttttagtgaacgtagtttcttatgtcttagagagactatttgacaagcggctaggcaatggtcatagcaaaaggcgtaaaaattatagattgggctctaaaagacatcacaagcgtcactagcctcagccaatacatttagttttaatgctataaaatttggtgaaacaaaaaatcgttactcatttgtccgattagagtagcgatttttttgtgtcttaactctcgcacatgcaagtcgtttcacttttatatatacatgttagcatatttttctatatttttctatattcagggtttgtttgcagtatttacgtttaaattaatgttttggctctaaaaaagatgccgcttatgcgatatcttggaaaatattgttgttacaacttagctctgtttcagaaattcttctaactgtttatcagagaacacattgccatatttttgctttaattgttgcagaatttgttggctagtgcagcctacatctttcaaagaagcgactaatgtaagtgcacctgttttaaggccttgctgtaggcctttcttttcgccttcttttctgcctttcttctcgccttccatacgacctttcttttcaccaacttgctcgcgttcaagcattctagtttcaaaatccataatagtgtccctccattctggatcggcattcattgattcgatgcgtttttgtgccttatcaaagagtttatcgccatgtaccggtaaatctttcatgagtttgactaaattaagtaatgtttcagtctcggttccatcaggaactccgtttgaattaattataattttagtcaagccatcctgcaatatatctgcatgattgtctacattaatagtttggtatgtagacttgattgcaactttttgcttagttttgaacgtgcaaagaaaaataatgaagacatttttcaaattattgtaagtatagccctggtggagagtatacctttgatcgtttttcgaagcataatagcgcatgcgacgggcaatatcgtcatcgtctgaccgctgcatctcaatattgtaaaggttgccgttaatatcctcaaccaaaatatcgagtcggacatctttttgatcccgatgctcaggatcgatgattacttcttgcttcttaggcggaaagatcttcttaattaggatctccggcagaattccttgcaaaacatgcttgcagaaagctggattggacatgatttcgccaaaaaccttatcttctgaaaaaccaaaccataattctttttgtttgtgcgtatttttcattgcgcacctctttctaaaaaatagtaggataaaatgtaccctctattatttattacacaaaaaatcggcaaaattttttataaaattgtttttttcagcataataatttctagctatacaatcaatgcttcatactgtataatactattcaatatttgaaacaatatagatatattcaaacatagggagtgtgatggatgtgtcagcctacaagcaacgtaacttggggattattagcttgcccactgacataaaatatcgtaattggtccaaggaccttaccaagcggagaattgagaatgactcgcaattagagcaatacatcaagtatgacaataaatatcgactcaataagaacacattggcagtctatgagttcaagcaaaatcctatcttaggcaaatataaggcagtagccttcgacctgaatcgtggaattgtgcttagtcagaagtcaacacatgccatgatgcaaggattgatgcggcatgccgtacattgcgatatgatttggcagagaatgctagctcgcgaggctggagttgatatctatcaagggattgtcatgtacaatgtgctttatttttcaatgcatgcatttagtggaaacttcttcacggactggatttgcttgcactggattaaagacttccacgtcaaacgccatgatcaagctattttcaacagtattgcacttgatgaaaacggcttggtttataattttgcttttgattctcctaagcccaatcttacgaagataattggtcagtatctgtttcataatcattattattctgacttatattatcagcatatgttgcaagaaaataatcttcgcgtaacagccattaattctgattcaatcctgcataattctaactattatgtgcaactggacttgtacgctattgatagttttaaaaagctggcagacaaattctacaatcatgttttgaacttacacctacttacgattgtgaaagaatttaagccattagattatttgcaccgtgaacaccgcttttttactaagcagattattaagatcagatataatcgttaacagctctcatgagctgtatttttttgcacttttttgactatcatctgttcttcgtcaggtactatctgacttgactttgcttatcgtagaaattaacaaacacatgcgacacttgggattagagcatctcaccactaagtttttttgcagatccaatcttgctaatctaatagtgcacaagcgcttgtgacatcatttaggagagtgtcacaatgacaagtcaaaaatatttcgaagaagcatggaaaaatcgtaagttagttggtggtgccttaaaggcggcacatgttcgaccggactatcatctctatgaagatctgttgcaagaaggtgtaattttgtatgccgagatgttgcgcaaattagatgggcaaaaggttcgcagtgagattgataagcttagcttcaaaaaggttctttggcaaacaatcgatgctctgcgccgagagcaacgcgtatgtgaacgcaatactgcaattgacgaggcttatgacttaggtaaaacagaggcatgggataatcttgtagctttaaaggatgaagttaacaaactaagtcaacttgagcaagtaattctttttgagcatttgcttgagaaaaagacaattacgcagctagttaaagaatgcggtataccgcgtattacgttgaaacgattgaaaaagcagcttttaggtaaattacgtaatgtgatggaacaataagttcattttgtaacaaaatttaatttcataaaaaattttacctactttttgcgtaataagtagtagagggtaattttgctgaagcaataattgaaatgaggtaaaatatgattaaaataaaaagtcgatatccgagaagcactgacgatttggtctttggtcacgtcatgagcaataagaagaattgaatttcagactggtacgcacgttaaagttttcaattctaagggcaataatcatgacctgaaccaaaagataattgacttcttggattacatgaatggaatcatcaatcaccctgaaggttacatcgccagcttgcaaaaggatgtcgaccattacgtgaatagcggaaagtgggtcgaagatatggacaagttggaatatgaaatgaatgaagtcgctaggaaagtaaaaatagaagatgctaagaagctagtcctagtcattaaacgaatgggtggtactaaagacactgccttacaagaactcacaaacaattacggcgatatgcttagccatgatgaaattatcaaactagtacatgaagtttatcagtaaacagtaatcaataatctacagtaaaattatctttcaaaggtgtcgcaacagcgatgccttttttagagcaaaagaaaaagttcccccaattttatgttttataaaaaaaacagtatctatgctaattatggttctcaaattgaaaaatggataatttgatgttggaacaattgatggtattcaagttaaatactgcttgattggttgttagaagagtaaaaaagccatttcagtcacatttttgctgaaatggctttttctattttccatcttttaattatattatcttgaaatgacctcttcttatcctgaagtgtagtctaccaaaaatgtcagagattatttcgttccttctcgtagagtaaattattatcctaaattctattctcgttaatcatgctatcaggcaatataattttcattcgatcatcgaacatattgaagtttacctcagagccttgaatctgataatcataatgaatcaatgcattaactaaaacctctcgaataaccttaaatggtttaaatatttttatattgcacctgtatcataatgataaaaaagttaacgaatgcaactcgttagctctagtcgtagtctaagataactattagcttaatttttaagagcaaaagaaaaacgaggcaattgcctcgttttaaattattttctctttttagtatgtttgacagttttcttatgtgcctttttgtgattcttcttatgagctactttattatgtttcttcttggtaactttcttcttgcatagtatttccagtaatattacccaaactagtatgacttaatcgaccattcttgaccgcaaaatcaaattcaagattaccttgtgcaagagtactgtgtgcattaacactagcagaaccaataatttcaccattgttattaacaatagtaactgaacgatcagttgaagttggcgtcaaacccattattgttacttgtgcatttaaagtatatttaccattgtttaaaactgcatcgtttgtttcaatttcagtaccagtattattagtcaaatggatgttattaattgaggtagaagcactaattctagtgctgtttgtgtatacacttctatcacgaagatagtgagtgacaacactacttttagttacaactgcagctgcttgaatagtatttggggcagctaccaatgaaactacaggcgatgcagcgaacaaagccgccgctacaatactagtaaatacgcgtggtgctagttaaatcgttttagttaataaaaaagtccaattagactagactcaagttgtaagtaatttaaatagaaaagagtctgatctaattgaactatctcaagcttaatcgtttttctcaccatttacaagttagttttaatcggttaaatgtgatttgtcgctcgctgtataagctttatgcgcctgatggacttaaacatcgtaaaaatgttgatcagaccaagcttcctgatagttctatcttagcgatgctcatttggcaaactgaaattggaattgaatctcaacgaagattctgtaaattcttcgttggcttatctcattctcgttttaaccgtcgagctcgaatgctcttgcctctaattcgttgtatccgtcagggttggaatcaggaagtaaaggtaggtggagaattattgattatcgacagttttccgattccagtttgtcagcctgttcgcaattatcacgttaagatcttccgtggcatagccgatattggttataaagcgacgaaaaaaatctactattatggcttcaaagtccacgcaatagtgagtgatgatggctatctgcttgactacgcagttactaaggcgtcggtacatgatgcaaaagagacggtagaattgatgatcaatgctcatccaattaaccattatcttttaggagatgaaggctatttaggaaaagacttagcagccaagctaaagcgtatgggatacgtgctttggacaccatatcgtaaaaacatgaggggtgctaaaaagcataatgatcatcagttaatggcaattagaagaacaatcgaaagcgacttttctttgcttagctattacaatgctgagaataatcgagccaggagcttagtaggttttcaacaacggctagaaatagctattttagcttataatatggcatattgtctagaacgatttaactagcaccacgcgttagtaaatttaaaattctttttcattattatttcctccaaaaaagtgtctgggaaaaaactaagtctcagatcatgaaaaaagaacgttgaatttttgtttcaacgctctttttgtatacttttagctccagccttgatattattaaatcatcacaaaataaaaaaggtggaaactaacatgtacaagaattatatcacaggtcaaactgctttaacacttaatctagattttgccattccggccaatcatttggctaatgtcatcagctggtttgtagattcaattccagaagatgttttagtaggcaagactgctaaaacgggccgcccagcctatcatccagccatgatgctcaaaatactgctttttgcttactccagaagagttttttctggcagaaagattgagttgatgctggaagaaaatctgccaatgatgatcttggctgaccagcaaaagatttcatatcatactatcaataattttagatcaagcagccatgccaatgaactgattaaaaagagctttatctacttcactaacctgttagaagatgaaggcttaatcaatgaaggtgctgcttttatcgatggtactaagattgaagctgatgctaaccgctatacatttgtctggcgcaaagcggttgaaaagtatcatgaaaagctgaaaggccaggcagttgaactttatgatgaattgattactaaagaagtagtcaaagaaatggaaaaagaaaaagttcaaactagtcaggggctaaaggaattagctcaagaaactgaagcagaaattaacaagctgactaaagagattgagcaggaaaacaaagccattcctggcggttcacctcgaaaagccaagcgacgtggactaaaaaagattctgcaccggctaagaaaagattatgtgccaagaatgcaaaaatatgaagaagccgaagagatctttgccggacgcaacagttattccaaaacagatcatgacgccacctttatgcatatgaaggaagaccacatgaaaaatggtcaattaaagcctggctacaatattcaagcagtcacgaccgatcaatatgtagttgattatgccatctttcctaatccgacagatttcaaaactttggagccggttttggatcaaatgaccgtgttggacaagtttgacaaaatcgtcgccgatgctggctatggcagtgaatacaattattcgatgctggaggaaaaatatccagacaagaagtactttattccctacactatgtatgaaaaagaacagaccaaaaagtataagaatgatccaactaagctaatcaactggtactacaatgaaaaagatgattattacattgatcatcatggcgtcagattcaatttcaaatattacagccagcgcaaggatcgttctactggtcaggtccgtgattttaaggtttatgaggcagacgagttccagctaacgccagaattggaacaattggctaaaacagctagcggccgccagcgccaagttcgctataatcctaactggcaatatttaaaagaaaaagcaaaagaagttctccaaagcgaagaaggcagacacatctatggcatgagaaaatatgatgtagagccagttttcggacatttgaagaacgtatttggcatgcgcagaacgcacctgcgaggtaaagagaaggtcgaaaccgatatcggaattgcctttatgatgatgaatttgaacaaatattgtcaaagaaggtggctgaagggccgatttttattgttaaaaattttaaagagaacaaaaaaacgatcaagattcttaaaaaaggaaatcttgatcgtttttattcatctggaagctagttttttcccagacacttcttatttgtcagcgtataccacagacttaattaaaagtttgaagcctttacgtaagtcttttcagtgttgttaccgatcttgtagtatcgcttaccgttcttgaacttgtaagagccaccgtaggtaacaaccttgtcacccttcttaagaacaaccttattagcacgcttctttgaagtcttgtaaacgtatgcgttgtgcttcaaagtacgttcagtaccatcaatgttgtctgcgttgatgaacttgcctgaaagcttgccgtttccaactacttcgtagtaagccttgccgttgatggtagtggtcttaggtgaaacagttactgagttgtaacgagtcaacttcttgtcagtatcaacatgcttgccgtccttgttgtagtagaaggcgttgtgcataatagtcttgctttggctagcaacagtagtatctggcttagtagcagttaagtctgaactcttaacgaattcgtttgagccgtccttgttgatacgagtgtattcaacaccgttaacagttaccttaccgaatgtgtaaacagctgcgccctttgcaagagctggaatattagcagcttctgaaacaacattaccgttaatgttgtaaactttagtattatcagcctttacgtattcttgtggtgccttttcagtaggacccattacaattgcgtaaacagtaagctttgaagtaaagccagctggattagtagcagtaatagttactgggtacaaacctgcaacacttgggttaaccttgcttgagtcaatcttaatattgcttgagttgatcaattgttggtgagcagctaattctgctggagtcttgtcgaagccagtaccataggcactttgtacgtaagctttaacagcaccagttacagcatcgttgttaaatttaccatttacaataactttggtcttgtcagtgtccttaagtactaagttacctgaagttttaccatttgacataacgttgtcattgtagtaaacgttgccgtcaaatacaaatgcaggtgcattgtagtttactgatgcattaattcttacagtaattgtagttgaattaccattttctgacttagcagtcaacttaaggttgaaaccgtttgctggataatcaaagttaccgtttgaagcacgcttcaagccttgagctactaattgactttctacatctgaagcggtagtagtcatattaatagtgtcatttgattgatcactggtcttccaagcatagtgcttttgaatagcattcaaaagatctgatgaactaaagccgttagcaatttcgtttaatgaaacagtgctaccatcgtttacaacagtgttagtatccttgttgtagaagtaaggagtaccttgttggctagcgaacttagcatttaaagtaacttggtaagctctgtcattaacagtgaatgtaacaacttgttggaattcaccatttgagtttgaagcagatgctgacttaacagtaatattcttcatatcttctggcttagcatcctttaatgcatcgccacctaattgtaagatagcatccttttgagcatcgctcaatttgatactgaattgagtatttgaagcacggtcaagaacaatggtgcctcttaatgtaccaaggtcagtaacttcttgagaagtagcagctgaaacagtagaagcaggtgcaacagtgttggtagtggttgcagcagcgttaacagaaacagctgaagcagcgacaggagcaacaggagcaacagctaataaagcagcagcagcagcgctaacaattcttaaatttttcttcatgtggtcttttcctccttgaaatataaaaaatgtaataggccataggttcagcatgtagggagcctataatgtacaaaattcttcaaagcaagatccatgagtttataactctcatgaggtagtagtcattgttgaaggatcagcatgcgtacaggcgacacgcctgaagcacgtatattgtgtactcgatttttgtcaagcaatgaaagggtggtttctgtcctcttatttgcttggggtcggttgggtggtttttgtccgctgcgcagatacttttatgaaaaaagagtacgatgcgatttgatgatttagagtgtcatttttggttttgttaagggatgcttgtaaaataataaggtaaagaaaatctaaagaagtaattttgtgaaaaagaaatcgacattttttgcgtacttatatattgtcaaaattaagatatgtaggtgataactatgttaaataaaaaggataaaactaaaattcaagaattaactgataaaacagtggacttgatcgtagaaaatatggggaaatcgcgtaaagaagcggaacaagattttcaaaagtcagatacatatgcgttcttatggctagcgaagcgtaatatcgaaaatgcgcaccctattattttgtacagaatgtttaattctgagttaaaagctaaaccaatagacgaagaacaacaaagttttattgactttatgactgataacacaatcgagttaattacacagaatactaatttgggaagataaaaggcaactaaagttttcaaatctacaaaggtatattggatactagttcactcaggacataatttagatgaatcttctcccgaagagctgtttgatatgtttagaaatgaacttagtataggtaatccactaccttcatctatgctgaagttaacttattaaaaaatttatataagttaaataatattattacaaatgttacttttttacgacaaatctgttgaaacgcttgtctagacctaatttgatagatacaatggaggtgttatattaaggaggataattttttatgaagaagagacttttgaccagttttgctgctgccgcaatgcttacttctgtagctgtgccagcagtaaatactacgatgatgaatcaagcctcaagccaacgagtttctgccgctaccgctgatcaaactgcatttttaaacaaggctgccaagcaggcagttaaagcagctaaaaaatatggaactttgccatcagtgatgattgcccaggcaataactgagtcaggctggggaaagtcaggattagccgtgaatgctaataacctttttgggatgaaggctgatgattcttggacaggtgagacttatactgccaagactagagaagaagataaaaacggtaagagctactatattactgctaagtttagaaaatacccatcttttgaacaatcatttgaagataatgggagtaagttgagaaatggtgtttcttgggatccgttgcgttataagggcacttggattgaaaatgcatcaacttatgcagctgcaaccaaggctttgaccggtacgtatgctacagactctaagtatgataaggcattaaatagtcatattactagttctaatttgactaagtatgatccagtaaccgttaatactactagaacttatactgctggcaaggatagttcaacttataattggccaactgctccatctgttgccagtgttattggctctgttaaagctggtgaaaaagtagtagttaccaagactattactttccatgatggttcaagcagaatgtatattgatggtcgcggttgggttaatggctcagttttggacaagagcagttccgcaactaaggaaccagtaactcaggcacctaagaatgtgccagctgtttctaagaacttgatgcataatgcctatgtttatgaccaaaatggtaagaagctaaagggcaagatgtacaagaccagtgatgaaaacggtggtaagtggatcaatacttatggtaccaagaccatcaagggtaagacctactaccgtgtcggtgaaaatgaatacattgcagctggtaatattgatggtagcctcagattcttgaagaagaatgcttatgtttacaatcaatatggcaatcgcgataacaatttgaagcacaagaagaatagccaaattgctacttacggcagtgctataactatcaatggtaagaaatactataaggtaggtattcgtcaatacgttaagaaatcgaacttcatgtaattaaggaaagggctttgttgtgaagatacgcaaatttttaattgccttaattgcgcttttggggttagtcggcgtatcatcggtcagtaaccaggtcaaagccgcttcgattaatactttagcgaagaaatatcaatatagtggtgtcacctatttatacaagatgctcaaactagaggggattaagtacaataaattccctggtgttgagtatcaaaatggcaagccagaaggaattgtcgttcatgagactgacgatcccggagctactgctcacgatgaagcaatctactttaaccgcgagtggaaaaatatcaacgcttacgtcaatgcttttgtagatagtaagcaagtcatccaaatgtattcacctaataatggtacttggggcgcaggaccgaatgccaacaatcgctttattcaaattgagctttgtgaagaagatagtcgtgatgcctttgctaagtcagttaataatgatgcaatttatattgccaagttgcttcatcgttacaatttaaagccagacaatgcttgcgatgatggtgaaggcacaatttggtcacacaaggcggttagcaccttcttaggtggaacagaccacgttgaccctgatagttattttgccaagtgggattacgacatggatcagttttattctttgatcgagtattactatgacttgcaaaagaagaatgaaaatactgatactaaggatccaaataagattaaggacgaagtaccagcagaagttcaaggtgcggtaactttaggtcacgatgcttatgtttatgacaagaacggcaagaagaccaagatcttgaagttagctggtagtccggtaaccgttttaggctacaagataatcagtaataagaagtactatcaaattggaaagaacgaatacgtagtagctactaatattgatgctactgctagaactgttaagaagaatacatatttgcggactcgttcaggtcgaattgaaaaaggtaatttggtcaagaagggtagtcgggtcatgacatatggcagcaagattacaattaaaggtcaaaagtattatgctttaaatgctacacaatatgttttagctagcgatattaattagaaaaatacgtcttaaaccataaataatgggaattaagacgtattttttgtataattcttgtgttgaatgtgaaaaggggagaatttaatggcgcaattatcattatttttggtcgtcttattagcgctcgtaattccaatatttatggcgcgtttcaaaataagcactgtaccaacggcgattgctgaaattatcgtcggaattattgtaggttcgagcggatttaatatcgtggtttcgatacatgatttaacatttttatcgaacctcggcgtaattttgctgatgtttttatcaggaatggaaattaattttgacctgctacagcgcaagaataatcctaaggctaaatcacaggcgggaaaaactgtcgatccgttgccaacagctttaacagctttcgctggaattgtggtaatggcctttgttttggcatatgttttaaagctgatagggctatttagcaatgttatcttggcagcgattatttttatgaccattgcattgggtgtagttattgctaccttgaaggaaaaggatattcttggccgaccgattggtcagacaattttgttaactgcggttttgggcgaagtaataccgttgctcttattaacgatttatgcctcagttaatggagggaatgctggccagctttggttgattatcttactgtttatcgctgcgattattcttttgcggcggtttaagcaaccgtatttatggtttagcaaagtaactaaggcaacgactcaattggatattcggttagccttcttcttgatttttgctttagttactgtagctgagcgagttggtgctgaaaatattttgggagcattcttggccgggatggtaatgaaattattggaaccaagcgaggcaactaaagataagctaacttcaatcggttatgggttctttatcccaatcttttttattatgactggcgtgggcttgaatttaaagtcactatttgctcatccatcatcattgatgttgttgccagttttggtcattttcttgttcttagctaaagctcctgtagtttttctttatatgcgctattttgaaaagaaaaatgcctttgctggtggctttttaactgctactacaattacgattgttttgccaactctacaagttgctagaaaattgcatgcaattacttcaacacaatcagatgcctttatcttagctgcggttattgtttgtatcgtgagtccgattgtctttaattcaaactttgttttatcacctgaggatcggatgaaagaaactgttactattgtgggtgccaatacttttacggtaccagttgcacatgatttgcatgataattggtatacgatcaagatgtttaccgatcagcaggaccaatacgaaacttatgatagtagggttaaaggtttaacattacttgataatttggataatcaaagcttagagcgtagtggtgcctttgattgcgacattttcgtagctgcagggcatcatgatcaagaaaatgcacgaatggcggaatatgccaaagacttgggagtcaaacgagcaattgcccgaatgaatgaagtcgatagcaatacgatggctcgatgccaggaggcaggagtagagttgttcaactttactaatgtacgttctgctctgatgcgagctttgattgagtctccaacggtctacaagattatgactgatactaacaatgtgttgtactcagttaaggtgagaagtacttcctatactggacgaccacttagggatctggaatttgtggacaagattacggttagtcgaattcggcgtggtgatgagtggttaataccacacggttggactgttattgagccgaatgatatcttgatcttttctggagaatttaaggttgctgatcgagtaaagaagttacttagtcatcaaaattagagataaaaagaggctaaatgcaaaaatcctgcatttaacctcttttttacgtaattaatgattttgtccttcaactgcttcaatgtcgccttgtccatcgcgctcaacaatagccccaattgcagcgattaagcctttaacaatatcggctaatgccattgatggagtgcttggtcttttgacaacttgttctggcaaaaatgggatgtgaatgaagccagctttaaggctagggaattctttagctcgcatgtattgcacttgataaaagatgtggttgcagacgtaagtaccggcagtgttggaaactgtagcaggtagaccaacagcgcgaatcgccttagccattgccttgattggtagttgggtgaagtaagccgtgtcgccatcggcttggataggttcaccgagcggttgataaccatcgttgtcggggatgcgaccatcgttaatattaatagctactcgttctggggttaaagcagcacgcccaccagcttgaccaacattaagtacataatctggtttttcttgcacgatggcatcatgaacaacttgggcagatttattgaaaaccgtaggaatttctaatttgataatttttgcacccttgattgagtcaggtagttttttgactgcttcaatggcggggttgatcttgtcgccaccaaaaggatcaaaaccagttactaaaattttcaatggcttttcctccaaatttaaatcatagaattttttgctttagtcaaaatttgcattgtctctaaagtattgacaaatgcttcatccgctttttgcgtatcgtgttgatcaatcatctgggcaaaagtattaaattcagctgccattcggtgcggatatttatttaaattataacgcttaggttgctcatttctcatttcaactgtgaaattatcaagtgttcccgttgagccgtcaaaatagatactacctttttcaccttcgataaaagaacgtggcgttacatagctatcttttgatgccgtgagggaggcttgtttgtcaggataagagaggtgaagaataccagaagtatcaacgcctttttgcatgttggcataatattgcacttgatcaggcaagccaaacaatgccgagacaagatgaatgttgtagatatttaaatccattaaagcaccgccatcttttttaggatcaaaaaccggcgcaattttgccttcaagaaaggcgtcatagcggctagaatattgcgtataatttaggttaacaatatgaattggtgcgatcttgttcaattctttttggatttgtttgaagttttctaaataaaggttagtaattgcttcaacgatgatcaaacccttttcgtcggctaacttttttaattcttttgcttgagtggtgctctgaacaaatggcttttcacagattacatttttatcgtgttctagagcagctttagcaatctcataatgcaagaagtttggcaccgctacataaactgtatcgacttcagaatcagccattaattcttcattgtccgtataagtacgtttgatgttgtactttttagctaattcccgggcaatattttcactgcgcttagttgaggaaatagccgttacagtcatattcgcaacttgatcagcggttgttaaaaagtcatggacgatcatgccgctgccaataattcctaatttcatttttttgcctacttctttttagtattagtggttggtaaatctttagcgttagttgcagagtctggtactcttaagaagtcatggctgccgaagttgccataactttgaccaactttaacgtacattaatttacctagtttcatattaacaaagacattaaaggtagataatttattacctttaattacagccttaacattcattgattggtacttgcctaattttttaatttggctgaaaattttagcttgatttgtactttgagcagtagtgtcaaaaattggtgctgctgcctttttcatcaaagcttggtcagtacttttagcagttaaagtataagtgtaaacaccatcttttttgctttttttcattttataagcagaaaccaacttatcacttggattggtgatcatgtggttattcatgatggcatcggttaagtcggcataattatgaccggttagtttttcaaggtcagccttgtaccaagtatcttgtccattaatgtagacattgttaaggttgacccattcctcagtagaactagttttacctttgctagtggtttgattggtgatgtggtaaacagtggttttaccaccaaaggtagtgttagctaaggcaacttgattagaagtgtcggtacccagagtaacagattgaataacctgtcccgacttgaagctacttttagctttttgtacaacttgagtcttagtcagagctgaagtagccttcttctcttgtttactgcagccacctaataaaaagaggacagcaaaggataaaccgataatcgttttcttaagtttcatttttttctcctctatgcttcaataagtctattataactaaaaagtccgttgctcgttggagttacggactattcttttactttattttgtattaattttgcctaaatctacggccgatttcttgatagaagcaggtaccgtcaactttttgacttgattaatttgatcaatctgcatggtgaaattctttttgtgtccttcatccttataagtagaagtcacattaacatttttgatgtcgtaattctgatctacgttaattttgatttcgttgctaattggtttaacatcatcaagatcgatgccgattaaagcagtaaaggcagaatcagatacaattgcgttccaaatttttttgttatttcctttataagtaagcagataatcattgccgttttgctttaccttaaaatattttgcgttagggatgaaaggcatgagtaatgtgccgttcaaattgtcggtaatggcaccataggcactagccttagacaactttgtcttaaaccaacgctgagaattggtacctttcatttggatatagttgcttttaccctcaatccacattttatagtgattagagctgctagaaacattagcataaataatcgttggctttttagtatattgggcttcggctttttgcaaagacttgccattgcttaattcattccaagtagcgtgcattgaactgaatttcgttttttctgcactggttaaaatcgtcttggcagtaggtaaattagctgtcttttttgaacctgtcttagagcaggccgttaaaaagagtaatgctaataaaacggtaatgataatattttgatgtttaaatttcatacataactttctttcattaaattttttcttctagtatagcaagaataacgttacaaaattgaaaaaacacgatttttttagtcttaactctatgaaaaaatttgtgaaatgtgtaaaatatggatgaaacattgaattttaaaaggagatatttcatgtcaaaattagttttaatccgtcacggtcaaagtgaatggaacctttcaaaccaatttactggttgggttgacgttaacctttcagaaaaaggtgttgaagaagctaagaaggctggccgtttaatcaaggaacacggtcttgaatttgaccaagcttacacttcattattaactcgtgctatcaagactttgcactttgcacttgaagaaagtggccaactttggattccagaaactaagacctggagacttaacgaacgtcactacggtgctttacaaggtttgaacaagaaggctactgctgaaaagtacggcgatgaacaagttcacatttggcgtcgttcatacgatgttttgccaccagctattgatgatgacaacgaattcagtcaagcacatgaccgtcgttacgcaaacttggacccacacatcgttcctaaggctgaaaacttacacgtatgtcttgatcgtgtaatgccattctgggaagaccacattgctccagatttacttgacggcaagaacgtaattatcgcagctcacggtaactcacttcgtgctttgactaagtacatcgaaaacatttctgatgaagacattatgaacttggaaatgaagaccggtgaaccagttgtttacacattcgacgaaaacttggatgttgttaacaaggaaaagttggacgactaatttattaagtagttattcacacaaatagaacttcggcgtaagtcggagtttttttatacaccaaaaaaggcatcaccgttaagggatgccttctttgtatcaacttgctccaaaaactataattatttctttgatttcataatttttttggaacaacttcattatattataaataaagaaagatcgccatttttttctaagaaagtggtgaaaattgacagttgtatatgataagtgctattttgagttacaggagtgtagaaattgggagaaaaatatgcaaacaatcgataattctctctttcaagtctctgtcgatgagaatggggcccggatggcacatctggtgtctttaacagatcaatttgattatctcggcgagcaagaaagtgaagaaggtatggcacttgcttttccagtaatggatcaagccgataatttggctaacaagttgccttggaccgttgttgacaaaggtgatactcgcgtaagtctaactttaattgatacgccggagagctataagagttttccatatcattttgaagtaatgactacttatgctttggagggtaatcaagtcaatatatccttttatttaaaaaattcttcaaataaggaactgccattttctttgggctttatcttaccaacttcttggcaaagtgaaagccaggtcaataagattagtttgactggcaaagaacatggcattgatcttacttcaactgattttaagttgagtgcaaaagaaggaagcgttacagcttttacggataaaattgaattagaggcaaaaagtagccgtaattttgcgttaagcttgactttgaagtaaaaattagtaacgattttaataagatatactaagcaagtcagcgatgatttgctttttttgttataatacattcaatgtgaatttacatcataataggtatattttatgaaagatagaaaacaaagatctaatcacccgcataatagtcgggtagacacacacagttataaaaatcgtcatatttgggtctgggttattagtatcgtagccttgcttgcggttgctggagcggcgtactttgcatcagtttatttccgtactaagtcagcggttgataagacctatgatcctaagactgcagtgaaaactacaggtgaatttgatggaaagaagaagttcgctgttttactgatggggactgatacaggtgcccttgatcgaactgaaaagcgcggccggactgataccatgattttagctgtagttaaccctgctaagaagcgttacacattggtctcaacaccgcgtgatacgatggcacagatggttggaagcgagagcttcaagacagaaaagattaacgccgcttatgaattaggcggggctaagatgtcaatggattcagtttctaagttaatcaatgtgccaatcaagtattatgccgtggttaacatgggtggaatcatgaagatgattcgctatgttggcggaattaatattagaccaacgcttagctttgaatatggcggttatatttttaaaaagggcaagctgacccatatgggtggtgcaggtgcgctagcatattctagaatgcgttatgatgatccgcgtggagattatggtcgtcaagaacgacaacggcaggtaattaccaccttgatcaagaaggcagtttcaattagttcattatcaaatctggattcaattttgacttctgtgtcaagcaatgttcggactaacttgccatttagtgcgatgcagcagattgcgatgaattatcgtagttgtgccaattcgtcatctagtgattatctacatggttacaatgcaatgatcgacgatgcggcttatcaagtacagccaactagtgaattgcaacggatttctaacctggtgcgcaaagaattagggttacctaaggaaacggtttcaaataatgaaactttccaaaacgaaaagaatattgcaaatggctttagctttaagagcgaaaaaacgcagcactatcatatctatgattacaccgaagaaggtgataattaatggcgcgcatttgggctactctgattggctacgtttttggaaatttcttaacggcgatgatcgttggcaaaatctttttaaaaataaatcctactgaatacggttcacataatccaggaacggctaacatgggtgctgtttttggtaaaaaatggggtattttaacctgtttaggcgatttgcttaaaagtttaattgccttgtttattgtatattttgcttttccagctcatattaatattgcttatacagggctaggcctgatcttaggacattgttttccaatctgggatcattttcgaggtggcaaaggagttgcggttgcagctcaggtagcagttttttataattggaaagctggctttgctactttattagtggctttggtattaacagcaattatgcaaaatttgacgattccgcctttagtgtttatgcttttattcagtataaatacattcttgcataatcaagaagcaggatttgtttttatcgtgattactttgatcatgtgctttaagttctggcatgatatcgtagactttttcaccggtcatggcaaaaaggttgatattctgctttcaattaaaaagaagctagggatcattaagtaatgacagaaatttttagtgaggacacagactagagaaaatgagtgagattaacaagaaaaaatcactaaatgctcttcaaatcatttgtttgattgtcgcagcattctttatgctagtgcagatgtattcttggggtagcacttttggtagattaccattaagtaccctaatgagatttattccaggactacttggtcacagtacgatggtactagtaccaatggtctttggtgctgtttatagcaaaagaaaggttcatccaactgaagcctttaagttttggattatagcggttgttacactagtgcttttatacttggtgaacttctttaaacgaccaggtacctttaatatgtggaagctctggggagtatttttcccagttttgactagtacatcagtattgttggctggcttgatttttagtatgctagttcaaccatacttgtatgaattacaacatcgcattactactaagcaaaatgtattattgcttagcgcattaactttgactggttttgcgactagtgcaggtacaatgatctttaacaagtcaatttatggcatttatttgatcttgtactttgcttgggggatgtttttagctaacgttaaaattcctaaaaaggtctttggctggtcaattgcagctggagtaatgtctttcttcgtaatgtttatcggtattcccggatttaatggggtttactggtaccaacgattatctggtcgaagtggcgtttattcctggaatcctaaatttttaagtaatattgcttcaccatttttgttcttaatggttttagcagccttcttaatctttagaaaagtgattgttagctatagtgctaagcagatgcacttctttattccagtaattatttttatggacgctccaattattggtggttttgttaaatcgttccgctttaccaatagcgctggatttaacaagttcttgatgattgtcatcatgatgctagctgcctggggcttaagctggctatatgagcgctatttattcaaggtgaagccggttaaacggacggttgcttttttcaagcaacataataacttagcagaaattgttgaagatgcttggactaacttcactgcttggatagttgaaaatcgagtacgactacttacatggggctggttctatgtattaagttttgcttcattcttaattgaatcagataatctgcggatccaaattacgactgcaactgatatcaatgccgtaattttcttgctcgggactagattcttcgctattattttgacagcaatcttccttgatgcaatgtttgcaattttctacttcattactacgcgttactggacttcaacagttttagtaactgtaattacaattggttgggctattgccaacaagattaaattagatcttcgtggggaaccaatttatccaactgaattagacgaaattgttaactggaagaccttgatgccaatggtcggccaacaaaagataattatgatcgctattgccttagtaattatcattgcattgactgtctttcttgcaattaagtttccaattaagaaaaagggctcatggaaacgccgtggtatttgggcattgttgagtttgcttttgttcatgacaccagtgcgctttaaccacgatggcggaattatttatcacattaaccgtggctttgataataagcaatcgtttagaaaccctgaacgtgatattcaaattaacggtccattattgaacttcttgaattactttgacctgcagattatgaataagccaactaactattcaaaatctacaattcaacatttgaatgagaagtacagcaagatcgctaatgaaattaacaaaacaagaaagaatactctaaagaatcaaactattgtttacaacttgagtgaaagttttgttgatccatatactttcccaactgtaaagatcgatcctaaggtgccaaatccagttaaatttattcaatcaatggctaagagatctacttacggtagcatgcttagtgcaggttatggtggtggtactgccaacatggaatgggaaactttgaccggtttcaacatgggaatgttcaagtcaaccttgacgccatatgttcaaattgtgccaaaccatgatttctatccaacggtcggaatggacttcaattataagtctgcagttcacccattcattggtacttactactcaagagtagaagactataagagatttaagtttaataagtttgtttaccttggctctaaatataagatcattgatcaaaagaaacttggtaaatcaacttataattctgattacactacttatgcaaatggtttgaaacaaatcaatagcatgaagggtggtcaattcattaatttgatttcaattcagaaccacatgccttacaacaattggtatccaaacaatgaatacatgggcaaggtatctggtgaactcttcaacactgctgctattcgtgaacaaatggcaacttacatgaagggtgttcaatacactgataaggctgtaaagcaatttatcggtaagattgataagatcaagaagccaatcacagttgtcttctatggggaccactacccaagtatcttgtcacaaaactacgctagtcgttatccagtgcaaatgcactcaactcgctacttcatttattctaacaagtatgctagagaacatggtgctaagagcaagttgactcacaactctaattacgtcaacactagtgactttactgcaatgatgcttgaacaaactaattctaaggtaactccttaccaagcattgttaacagaagttcacaagaagttgccagcaatcacgattaacttcaatggtgatcaaggcttccaattagttgaccaaaaggggcacttcgttgatccaaagaaattgacttcagaacaacaagcaattttgaaggattacgaaatggtgcaatatgatatgactgctggtcaagcttatggcttaaaagctaagggcttttacaagatcggtgactaaataaaagagatcgaacgtaaagttcggtcttttttctacgtaaagtcaagcgcaataaggtgtttggctttattttttacctaaattttgtcatgagtatcttttagtggcgatttatttttttagaaagcatactaaataagcccacctctatatttaatttatgggcttagcgttataatgtacttgatcaattaattacaactaaagtctttttggttatgtgtggctacgttgtaatcatatagttgatcattgataatcagagcataaatggttctgattagtttatgaattgaagcaatagctatctttttgaaccctttggtttgagaggatagctttttgctttcataataatctgctatatgacacggatttgtcttagctgcattatcaatttgtccaatagctcgataaagcaacttacgtgcgactgcattgccatgtttagtaatacttaaattagagtccatttctcctgactgatatctgcctggatcaattccgataaaagcattgattttattaggattactaaatctgcgtaaatctcctaactctgctaaaactctgacagcagtggtctgtgcaaagcctggaatgctttctaggttttctaaatcatgattaggcaaagacttcgctaacttaaccattcttgcgattaaattttctctttgatcacttaaattaagcaatctgtgtgcataatactgcacttgctcgacttctatgctagagcaagatacaactggataagcttgataagctaattcaattaatttatctgcagtccttagagcgtgtttaaaagcaatcccctttaagctcattaaccagttaataagctgttttttatcttctcttcttactaagtcacaatgaggatatcgcacaactatttgccagtaatttttacctttagcagaagaaaatagattttcaatttcaggaaaagtcgattgtagagcttggtgaagtcgatttttagccattactaagtcagctgttaactggtcatagaagcggctcaaagcattaagctgcttataagtttgagattgaagttgattaattggatgatgatatagtctttgaattaaggctaaatgataagcatcagttttatcagtcttattatgacgtagtcccatatccatttcttttttagctttaagaggattaagaattacataatcatagccatagtcttccagaaaagattgcagtgtacgtgaataaacaccggtagcttcaaaaataatttgcggatgtttagaaaaagcggttaattcatgaagcaattgaataaaaccaggacgattattagtaatggttagttcatttttgctttcaccaattagttcacaaacagtagaagtagacttgcttacatcaattccaaaagtaacttgcataataaaaacctccaaaacttagtagtaaaacgtatttacttaagaaatcagatctaattttctaaactcgacatctagtgtccacattcttcgaagagactattgaaaacttaagtaaaactgccagttttgtatacgacatcaagtgtctaaagacctcagggcatatcgttttactactactttaattctacaaaagaataaaaatagtgaatcaattatcccgtcggataactaattcactatttagcttagaatgttttgtatccaatgataaaataagggctaagaggaataactgataattagctgatttaaaggtgattagaatgaaaaagataataacaatggcactagccagtgctgcactatttggatcttctgcaacaactgttcaagctgggacatataatcctaagaacattaccagttttaatattaataggcgtaactatgtagctaagggaaagatttataaactccatttacccgcagctggtagattagttactaatggcaatgttactttaaaaaatagtatggaatggacctgtattccttatggtaaggacaaaaatacgtattatctgcgtaaaggcacatattatttaactagttcaaagaatattagtgtgaagactacttatactcgtttaactaagatccgtaagaatttagaaacttacgttgaaacaaagaagaataatgacaacagtagtcttaaagctagaaagattgaaattggtcaagatattaaagcaatgggtgaaatgtacgattacgatagtgtcgactactacacatttactattgactcacctcaaatggttacgatgaggatgatcaataatccgatttatcagcttggaaaaggtaacattttcagcaagatgaatgtaatcatgttcagtgaaaataatccagttggcggtagtacgatgctttacccagagagtttcgaaattaatggcaataagattgctagtcaaagctggtacttgtctaaaggaaattatacttttagtgtaaatactcgtggactttataattttcaattaacggctgttcctgatacgcgtgtggtaccggcagatactgagatagaatctttacaaaacactaaggatggtatggttgctaacttaagggatgcacgtcatgcgaagacttatgaacttgcatggcgtgaaaaaggctcaaaggcagctccattcacttctagtagcaatactacagaagtaagtactgcacctgctacacgttacatagacaaaaatgatcgtaaaatcccagtttcaattggtaaaaaattagttaatggtcaaagctactattttgtagctcgcggtgtaagcaatcctgattacattcgttacggcaatccggaaaaagataattattttggtgcttggagtaattcagtagaacacacttactatgcaccttcagatgcaacaccaggtgcagttgatttaaccactgctaaagctgacagtacttatcacaacattcatgtggcttggaataaaattgctagtgcacaaagttatcgcattgcctaccgccaaaaaggtacaaataagtggtactatgaagtaactgatcaggctactaacgcgattactggtattactagaaatagaaattatgaagtgaaattgcaagcattgaatggtgaaaaaactggtccatggtccgcaattaaaacaatttttgtaaaatagcggttgactaaaactatttttctcgttaatatcataactaacaaatgagtagcgagtcggctcagcgttcagagaactagcggttggtgtgagctagacaggccgattttagcgaagtacttaatagggttgctcctttaccggcttgaataaggcgcagcagcgcaaacgtgggtggtaccacggctaataatgtaatttagtcgtcccttggtcttttgaccaggggacgttttttattggaggaaaaactatggcaaaatttgatattttggaagatttaaaatggcgtggtgccattaatcaagaaactgatgaggaaggtttgagaaagtacttagcagaacatgacgattgggcattgtactgtggtactgacccaactggtgattcccttcatattggacaccttattccattcatgatcttgaagagattccaaatggcgggctaccatccagtaattttaattggtggtgttactggtgcgattggtgacccatcaggccgtaagactgaacgtactttacaaactgcggaacaagttaagcacaatgaagaaagcttaactaatcaaatgaagaagttatttggtactgaaaattttgaaattagaaacaatgctgaatggctaagcaagcttaacttgatcgacttcttgcgtgattatggcaagttattccaagttaacaatatgattaacaaggatgttgtagctagccgtcttgaaaatggtatttcatttactgaatttacttatcaaattttgcaagcaattgatttctaccacttgaataaagatgatggtgttcaacttcaaattggtggtagtgatcaatggggtaacattactgctggtattgatttaatccataagcttgaaggcgcagatcgtccagcctttggtttaactattccattgatgcttaaggctgatggtactaagtttggtaaatctgctggtggtgctgtttggcttgatccagaaaagactagtccttatgaattttaccaattctggattaatcaagatgaccgtgatgtggttaaatacttgaagtacttcactttccttagccgtgaagaaatcgaagatttagctgaaaagactgagaaagaaccttggaaacgtgctgcacaaaagaagctggctgaagaagttaccaagtttgttcatggcgaagcaggtcttgaagaagctaaaatgattactgatgccttgttctcgggcaatatcaagaacttatcagttgctcaaattgaacaaggcttgaagaatgctccaagtgcggaagctggcaatgaaaagaagaatattgttgatttcttagttgacactaagattgaaccttctaaacgtcaagctcgtgaagatgtaaagaatggtgccatttatgttaatggcgatcgtgagcaaagtactgatttcgaagttgatccatcaagtgactttgatggtaagtacgttattattcgtaaaggaaagagaaagtatactttagttacaattaaataattaaatatatgattttaacattttatatataaaaatagagggattttttcctctatttttttagctaataatcggagatatttactaccaactaatatttgtaaaagataaagataatgatttgtgtaaaataatattttacttcttaaattgttattttattttctaaaatcaattgctacaatctatttattaagttattcacaaattcacattattactatacaatttgttatttcaagtgtaataccaatataaaatagctgcgtataccttttgcaaatgctgatgcaaagcactctattaaaaactgactcttaataaaaatatgtgaaaagcagcactatctgctttacttctaatcaaacagtgttatagtaatagtgtaaagagaaagtaagtaaatagaaagaggttattaaaatgttagaatctaagaaagctattaagattatttcaagtttggtaatcggtttgagtttaggctgtgttcttactcctattgctcaagctacttcatttactgctcctaaattgggtactgcaacacaagctccaaccaatcctgctattaaaaagggtgataagatctttgttgttattaaagacaccaaaaatcaaaaagtagctgtttacaataaaaatgctgaaaaaactagcaaaaaagttgcaatgggttctacttataccgcaaaagacgttaagaaggttaataaaaagaagattgttagaatcaacaagagtcaatggttgaatactaaagacgtcgttaagaactaaataaaagcaaatttaataaccgttttgaatacttattttctaaaaatacttggagagaataaataaggacgaggatgttcaaatgaatgtcttcgccttttttggtataatgaagacgccgctttagctcaataggtagagcaccgccgtggtaaggaggaggtccccagttcaaacctgggaagcggcttagttgttgtttttggcaagaaaggaaaaattttatgaagcatgaacttacaatgaatgaaattgctaaatttcaaaaagaatatgagcaaaaaccacaaaatcgggttgcggaattggctgttgttaataatggtgtggctaaggctagtttggattcagaaaaggttaggaaattgaaccgcactttttcaattgaaatcccaactgataatgttactgatcaaaagcaatcgggtcgctgctggctatttgcggccttgaatacattgcgtcatggttttgctaagaagtataatgctaaaaactttactttttcacaaaattatttattcttctgggatcgaattgaacgagcaaatattttctttgataatattttgaataccgcagatcgtccacttagtgacagaacagtgcatacttatatgcagggacctgatactgatggtggccaatgggctatggctgtttctttgattaggaagtacggcttagtgccaacctatgctcaagatgaaagtttcactgccaacaatactgctttcttcaatcgtattttgaataataagttgcgagaagatggacttgtgttgcgtaagttagctcaagcaggtaaaaatgatgaaattgaagctaaacgtcaagaatttttgagtgaggtttaccgtatggcagtaattgctttcggtcaaccagtacaaaaatttgaccttgagtttaaggatgatgaaggtaagtatcattttgatggtgatcttactccacttgatttctttcacgactactttactgatgacttggatgactatattgttttgttcaatgcaccagatcatgaatttgataagctgtatgctttgccatttgaagacaatgtagagggcggaagtccagttcatttcttaaacactaaaattgaaaatcttaaagaagctgcgattaagcaacttgaagcaggcgaaactttttggtttggttgtgatgtaggtaaagatagcgatcgtcaaaagggaattttagctcataacctctatcaaactgatgctatttttaatattgaaactaagttaagcaaaaaagagagactggaaactggtgcttcgggttcaactcatgccatgacgatggttggtgtggatgttgttaatggaaagccacgtcaatggaaaattgaaaactcatggggaaacaaggtcggtgaaaaaggctactttgtgatggatgataactggtttgatgaatatctcttcaaagtagttgttaaaaaacaatatgtaccggaaaaactggttaagatttgggaaggcaaagcaacgccggtaaaagcatgggactcaatggcataatggaaattaaacaagttatcgattttactcaaacacacttaaagaatgaaaaaacgggtcatgatttttatcatggcgaacgtgtagctaatttggctagtcaaatgtatttagcagatcatgctgatgctcatgaagatagccgggtagttgctattattaaaacagcgggttatttgcatgacacgattgatgaaaaaatatgtgctgacccacaaaaggtaattgatgaaattaaagttttattgccgcaagtagggtttaatgaactggaggcatgggatattttattcaccattcaacacatgtcattttcagctaatattgagcatcactatcatttgcctttatctggacaatatgtgcaagatgctgatcgtctagaaagtttgggtgcgattggaattgcccgtgcctttacgtatggtggtaaacatggcaataagatttacgatccagagattaagccagccgttttaactagtcatgatcaatatcgtaaccatgtcgaaaccacaatcaaccacttttatgagaaactttttcatttagaagatttaatgaatactcctgctgccaaaaaagaagcggaaagacgaactgcatacatgcgcgactttgtacgtgaatttatgcaagaatggaatgtttagaataatttaattttgaataagccttgatacatcagcattgaggcttattttttaaataaattaaaaataatattaaaaaaaacttgcaaagcaaaaaatatttagctatacttataaacaacttaaagagttctattaattttctcataaacgaggggagcaataatatgaagtttaccaagttattcgctgcaggagcaaccgttttgattgctggctcaacattagcagcatgtggtagtaattctaattcgtcaagttcatcagctaagaaaacaattaattggatggattcggctgaaattccaacgatggacatttctaaggcaacagacgttaccagttttaaccaattgggtaacgttgaagaaggtttataccgtttaggtaagaattctaaagttgagaatgctttggcaacagataccaaggtgtcaaaagatggtaagacctggactttcaccttgcgtgattctaagtggtctaatggtgataagttaacggctaaagactttgtttactcatggcgcagaaccgttaatccaaagacggcttcacaatatgcttacctcttcgaaggaattcataatgccactcagatttctgcaggtaaggcaccagttaatagtttgggagtaaaggctgaaggtgataataagttagttgttaccttagacaaacgaattccatactttaaattattgatgggattcccattgttcttcccacaaaaccaaaaggtggttgaagctaatggctctaagtatggtacttcatctaagactacagccttcaacggaccttttgtacaaaagggctggactggttctaacctttcttggaagcttgtgaaaaacaagaattactgggacaagaagaatgttaagcttgatgctattaattacagcgtgcaaaagacaccatcaacagcttacaacttgtaccaatcaaataagcttgatgctactattttagattcacaacaaactaagaacttaaaacatcaaaagggttacactttgcgtgatactgcagcaaccttctatttgcaatttaaccaaaagaagaagattttccaaaatgctgacttgcgtagagcaatctcaatgtcaatcaatagaaaggcactgggaagtgctttaggtggtgctaataccccagcaaccagtttaacttcaaagggtgtagttaaccatgatggtaaggactggtcagaagttgttggtgataagaagaacgccgcatataacccaactgaagctaagaaactttacaagaaggctttgaaggaattaggcgttaagaacgtttcatttacaatcctgtctgatgatactgattcaggtcaaaagacgactgaaacacttcaaagtcaattagaagaaaacttgaagggtatgaaggtttcagtagctaacgtaccattcaagactcgtttgaaccgttcaactagtggtaacttcgatgttgttgtttcaggttggtcagctgactttgccgatccaatttcattcgttgacttgtttactagcaagaatgcacaaaataacggtaagtggagtaactcccaatacgacaagttgatcgctgattctaagactacagcagatacaactaagcgttgggatgaccttgaaaaagcagaaaagatcttgcttagcgatgaaggaatcgccccactttactacaagactgaagcttggttagttcgtccagacattaagggcattgtctacaatggcgctggcttaaactacaacttcaagaatacttatgtagcaaattaattaaaaaatcaggaggacatagtaatgattattatttcagcaattattattttacaaacaagacataaaaataatctctcttcacttgtaattgcgtaataatagtctagctatgatttgatgaatagatagaaggagcaaccatgtgaaggttgctcctttttgtaataaaaaagaatgagggtcaaaatgaaaaagtggaaaaagtattttagtgcaagtttattaaccgtcgtatcagctgcaactttggcagcctgttcaaataaaagttcgtcatctggtaccaagcaaaccttgaattggatgactaaatcagaattacaaactttagatttgtccaaggtgactgatgcaactagtttagatcaaattaataattcgatggaaggactctatcgtttaggtaaaaattccaaggtggaaaatgctttggcaactaagactgaggtatcaaaggatggtaaagtgtggcattttactttgagaaagaatgccaaatggtctaatggtgatccagttactgctaaagatttcgtctattcatggcgtaggactgttgatccaaagactgcctcacaatatgcttatcttttctcaggagtaaagaatgcggatgatgtagtagcaggaaagaagaaggttgaaacactcggtgttaaagcagatgataaccaacatttaaccgttactttggatagaagaattccatactttaagctattgatgggcttcggggttttcttccctcaaaatgaacatgccgttgaaaagtatggcaaaaattatggtacctcatctaaaacaatggtttataacggaccatttgtatcaaaaggctggaccggttcaaacttgtcttggaagctagttaaaaataaagattactgggacaaaggcaaggtaaaactaagtaagattaattacagcgtgcaaaagacaccatcaactgactataacttgtatcaatctggaaaattagatgtagcattattggcaccacaagctacaaaacaattgaagaaccagagtggttatacaattagaccagcttcttcaacacaatatttacaattaaacgaaaagaacaagcttttccaaaatactgacttccgccgtgcactttcattatcggttaatcgtaaggcattagcttcagctgtaggtggtgctaacaagccagtcactaccttttcaccaaatagtatgactgaagtaaatggcaaagattatactgaattagtcaaaactgctgaaactgataagttaatgacatataaccctactttagctaaaagttattggaagaaagcacaaaaggctttaggacagagcaaagttaacttcactttgctaacctatgacgatgatgatgccaaaaaagcaggtgaatacttgcaaagtactattgagtcaaacttgaaaggcgttaatgtcagagtaaatagtttacctaaaaagactgccttagttcgtggtcaaaatggtaactttgatgctttactgatgggttggcaagctgactttactgatccaatctcattccttgacttgaacacctcaaatgcttcatacaactggggcaagtgggctaataaggaatatgataagtatgtagcagcttctaaaactactggaaacgaaaatactcgttttgaagacttagctaaggctgaacgtgtattgttaactgagcaaggtgtagtaccactttaccagccagcagaagcttggatggttcgtccaactgtcaagggcgttgtatataatggtgctggagctaactataacttcaaatatgcttatgttgaaaagtagactaaaatcctaaatatctaaataatagaacttataacaataaacaactcctctatgtaattaaaaagcagaccgaaaaaatccaatgtcattaagttaagacattgacaattaagggtgcttttttagagatcgaatcatttggattcgatctctttttttgtataaaataaaggcgaaaagaccagccttttcgcctatcttatatattatatattttaaaccttcaaaattattgccagaaagatggtgttaattatgaaagcccttcataagaatattctagaacgtcttgatcaaattatcaataatactggggatcatattcacgattttattaataatcctcatgcttttaccaggaaacgcactttagatgcagcgacagtccttaaaactacaattaacatgcaaggtcagaatttaaacagtgaactctttagagcttttggcgaagatgcaactaaaaagaacgataaagtagttagtacttctgcctatgttcaacgcaaaagccagctttctcctgcttgttttaaacatattctgactgtttttaatcaaaatctatttaatattcaactttttgatcatcactaccgtttgtttgccattgatggctctgactttaatcaaatctggaatccgaaatcgaataacattgtacaagcttcttctcataaaaagaaaccctattgtcaaattcacgttaatgccttatatgatctattgaataatacctaccaggattgtatttttcagcctaaatcagaaatggatgaacgcaaagcggctgttcaaatgcttaaagctttgaattgtggtccatatattgtaacaatggatcgtggctacactagtttcaatatgattgaaaactgcaatcgcctgcctaactgtcattacataatacgaactaaggctggacaaggcggagttaaagaaataacgacattgcctgatcaagaatgtgatcgtgagatttcctgcctggtaactacttctaactattactacatcacgcataaagccagtgagaatattcaccatgtccagcatcattatcgccaatatattaagtatcgctctaaaaatacccaggatctaagctgggattttggcgagttatgcacaataaaatttcgagcctgcaaatttagaattaatgatgccaaatcaggcaaagaagaatgggaagttgtgctaaccaatcttgatcgaaaaaattatccgctaaaaagaattaaagagctttatcatctgcgttggggtattgagacctccttcaagaaattgaagtattctttaggcagtgtacagttccattccaaacaagataaatttattgaaatggaaatttatgcccatatgattatgtttaatgcaatcagtcaaattgatgcacaggcctatattccgcaaaagcattgcaagtatcaatatgccatcaatttcaagcaatcatgcttgattattcagagcatgtatttggcttcttctttaacgcaagattttgaacggatccttattcagatcagctattataccattccaattagaccaggccgcaaggacaagagaaatattaagcccaaatcagctgtatattatttatatcgcgtagcttaaaaaagcagaatctgtgctatgccttatttgttgtacgaaaaaagcaccaatttaaccaattaaatgttaaatcagtgctttaaaagtctaatattaattgtcaatgtcttaacttaatgacattggaaaaaatcggtctgctttttgattttcgcttgaaaaaagcaagttaggctagtaaagtaaaactaataattttttgaatgagaaaaggagagcttaaatgtcaaattgggatacaaaattcgctaaaaaaggtttaacgtttgatgatgttttattaattccagcagaaagtcatgttttgccaaacgaagttgatttgagtacgactttggcggataacattaaattaaatattccattgatcagtgcagggatggatactgtaactgaaggtgcaatggcaattgcaatggctctccaaggtgggctaggcgttgtgcacaagaatatgtcaattcaagcgcaagctggtgaagtagccaacgtaaagagcgtagttgtgccaactagtgctgcaaaggccgcaactgatgatcaaaaccatctgctctgtgctgcagcagttggtgtaaccagtgatacttttgaaagagcagaagcattgcttgaagctggtgctgatgcgatcgttatcgatactgctcatggtcactcagctggggtattgcgcaagatcaaagaaatccgcgatcattttccagaagcaactttgattgctggtaatgttgcgactggggatgcaactagagcactgtttgatgctggtgttgatgtcgtcaaagttggtattggccctggatcaatttgtactactagagttgttgctggtgttggtgtgccacaaatcacggctatttatgatgctgctacagctgcacgtgaatatcacaagccaatcattgcagatggtggaattaaatattcaggtgatgttgttaaagctttagcagcgggtggcaatgctgtcatgcttggctcaatgctatcaggtactactgaagcacctggcgaaatttttgaagataatggcaagaagtataagcgctatcgcggaatggggtctgttggtgcgatggcccaagcacacggttcaagtgaccgttacttccaaggtggcgtaaacgaagctaataaacttgttccagaaggtgttgaagctcgagtagaatataagggcgatgtttctgatgtagtctttcaaattgatggtggtctccgttcaggtatgggatattgtggtgctgcaaatattccggaattaattgataaagctcaatttgttcaaatcactaatgcaggtttacgtgaatcacatccacatgatgttcaaatgaccaaagctgctccaaactataagtaaagcaaaatagatataataaaagttaaaaataagagagaaagcaaaatttctctcttatttttttaattttttggacattttcactagatatatttatttcttttggtataattaaaacagcattaaaaagtaaatgaaagcataaaataaaatgagggagcaattaatatggctagatacctattaaaacgtatattttatatgatcctcactttgcttatcgtggctacggtaacttttttcttaatgaaattgatgccgggttcaccttatgctaatgaagcaaagatgacgctaactcagcggcaaattatggatcaacagtatggtttaaataaacctatctggcaacaatatttgatttatattgcggggatgcttcacggtgattttgggacatccttccaatatagtaaccaaccggtagcttcattaattggggcgcgtttgggtgcgtcagtacaattaggtttacaagcattaattttgggagttgtccttggtgtaatcgctggggcaattgctgctatgagacagggtacttgggttgactcaactgctactgtaatttctattttgggtaaatcagttcctaactttgttttagcagttttgcttcaatactacatcggtttaaagctaggttggttcccaattgctggttgggggcaattttctcaaacgattatgccaacgattgctttggcagttggaccatttgcggaaacagctcggtttatccgaaccagtatggttgataccttaagtagtgactatattgagttaggtaaggccaagggcttaagtagaatggaagtcattagaaaacatgcaatgcgtaattcaatgattccattagtaactctgattggtccttatgctgtagccttgatgactggttcaatggttattgaaaatatctttaacgttcctgggattggtgaacaatttgttaagtcgattttgactaacgactatccaacaatcatgggaattacgatggtttactgtattggattagtagtaattctgttgattactgatattgtttatggattaattgatccaagaattagattagatgaaagcgaggcctagaagacaatatgactgaagaaaaattaaaccttactgcagatgcctttgaacccttaccaaaagatgaagcacaggataacgaaaacattgcaggtccatctttatcgtttgcacaaaatgtttggcttcgcttcaagcagagaaaagcagctattatttctgcaattattgttattttgatgattgtagtagcttttggttcaaccccattcatcaataaatctactttagttaaatcgcacccacaatatgccaatttgcctgctaaagtgccaggaatgagcgcaattaacgggttgaacggtaagattaagcaaaatggcaagtgggttgatgcttatgcccagaatggcgtgcctaaagataagtattttatcgcaggtacagattatttaggcagatctttgggacaaagaattatctatggtacaaagatttcattgatcgtcgctttagttgcagctttctttgatttaactatcggagtcgcgtacggaatagtgtccggatggaaaggcgggggagtcgataacgtgatgcagcggataatcgaaattatttcctccgtacccaatttgatcattgtagttttgatgttggtggtattaaaaccaggtattaagtcaattatcttggcaattgctatttcaagttggacgacaatggcgcggcaggtccgggctgaaacgttgagtttgaagaatgaagaatatgttttggcagctagatcattaggtgaatcaccttggaaaattgcttggaaacacttagtgcctaacctttcaagtatcatcattattcaaacgatgtatactattccaactgctatcttcttcgaagccttcttaagtttcatcggaatcggtatttcagccccagaaacttcactaggtgtacttttgaacgaaggacaaaagaattttcaattcttgccatatcagatgtggtatccagcaatcgtattgtgtgtgttgatgattgcctttaacttattaggtgatggtttgcgtgatgccttcgatccacggggacaaagatagaaaggattaacctaaatgccagaagaaagagttttagatgttaaaaatttaaaaattgatttccacacttatgctggtgaggttaaagctattcgtaacgtttcctttcacctaaataagggagagacgctcgcaattgtaggagaatcaggttcaggtaagtcggttactaccagaagtattatcggtctgttagcacgaaatgctcagattgaagacggtgagattgatttccacggcaaaaatttgctagagttatctgaaaaagaaatgcaaaaaattcgtggtaacgaaatttcgatgattttccaggatccaatgacttcgcttgacccaactatgaagattgggcagcaaattgcggagccattaatcaaacataagggtgcctctaagaaagaagcttgggctaaagccttggaaatgatgaaggccgtgggaatcccaaatgcagaagaacgaattaatcaatatcctcaccagttttcaggtgggatgagacaaagaatcgtaattgcgattgctttaatttgtgagccagagattttgctggctgatgaaccaactacagctctagacgtgactgtccaagctgaaatcttggacttgatgaaagacttgcaaaagcgggttaagacctcaattattttcattacgcacgacttgggcgtggtggccggtatggcagatagagtagctgtaatgtacgctggtgaattcttagaattcggtggtgttgatgaaattttttatgatccacagcatccatatacttggggcttaatcaattcaatgcctactttaaacagtgatactttggagtcgattccaggtacgcctcctaacttgcttgatccgcccaagggtgatccttttgcaccaagaaataagtatgccatgaagattgatgtggaaagaaagccaccatttttcaaggtaactgatactcactatgctgcaacctggcttttagcaccaggtgcacctaaagtggaaccaccagctgaaattacacgtcgctggaaaaaatataacttgatgaaacaagaagataaactgccagaggttaactagtcgcggtaaaggagatttttatgccagaaaaaaagaaaattttggaagtaaaacatctaaaacaatactttaaaaatggtcgtaatgtcaccaaggctgttgacgatgtaagctttaatatctatgaaggtgaaactttcggcttggtaggtgaatctggttctggtaagacaactactgggcgctcaattttgcaattgtataagccaactagtggcgaagtgatttttgaaggcaaaaatgtagcagatttaaaaagtcgtgcagacaaactagcttttacacgggatgcacaaatgatctttcaagatccttatgcttcacttaatcctagaatgactgttgaggacattattgctgaaggattagatattcaccatttggttaaaaataaagatgaacgaactgagagagtagaggaattattggaaactgttggcttaaatgcaagtcatgctagccgttttccacatgaattctcaggtggtcagcgtcaaagaatcgggattgctcgcgccttagccgtagagcccaaatttattgttgcagacgaacctatttcagctctagacgtatcaattcaagctcaagtagttaacttgatgattgaattacagaaaaagcgtggtttaacttacttgttcattgcccacgatttatcaatggttaagtttatttctgaccgaattggtgtaatgcactacggtaaactactggaagtaggtccagccgatgacgtctatgatcgaccacttcatgattacacgaagagtttgatttctgcagtgccaattcctgatccagaagttgagcggagccggacaaggattccttatgacgctcaaaaagaagaaatggacggaaagcaacgctcaatgcatgaaattcgtccaggacacttcgtacgctgctctgacgatgaagtcaagcattacgaagaagtagcggcaagctacgaaaattagataccaaatctaatgcaactctctctatattaatattatatttatgctaaaaaggcgatccgatatggatcgcctttttatatgatcattgctcgttaagctaatgaatcccatgctggtaggtcagtgattggaccttcagcgagcttcttttggttttcagttaagtacttcttgtggactacaacttcgtaaacatagtccttaaaccattcattattcatgacgtagaagcctttaacaccagatttatcgccccatgagttctcaactttccattgacgaacttcgccgttgtcttcatcaacaccaactaaagtcatggcatgtgacacttgaccgacgccggtctttaatctgtctgctttagacattttaaggtcaacgccgaataagtcatctaacttgtacaaattagtgtcaaggtaaccagttttacggtccatttgacgtaaaacatcgttaccaaaccaaacagcttcgccgtcttttaattgagcgatagcagcgctggacaagtattccattggtacattcaaaatcttgattctcagtgagccttcaatgttgtcttcagctggtagaccataaagcttgttatagtcatggtctggagcattggttaaaacaacatagtcatcaaaatcaacgtcgcccatgtacttgtgtaaaaactcaagtggagttaggttcttttctaaatgatatttcttgtcgtcatcacgatattcaagatcgaaagtcttaggtggttcacctactgcgatagcagtcatttggtaaacttcgcttaaaaatttttcgcgaacctttttaatttcatcatctttgccgtattgcttcaagtggcgcaatactaaagcatccttctttaacttatcgcctaaagcagtcgcaaaaccagtagtatcattggtgttaaaagtttctggcattgcatatgaaggaacaacaccatatttttcaactaaagcggcagccatttggaattgtccaccatcactaccagcaaagtctaagtcagccttaacttgacgtgaatcaagtggcatgtcagcactgtctaagattctgttgtagaacatgttagcacgttcgatcttatcccagaagaagttgtaagcttgtgagaaggtgaagtccttagccttatatttcttaccaaaagcgtggcgcaaaacgttcaaagtcgcaaacagccagcaacgaccagaatgtttttggttagtgacattatttgtatcaagttcagttgaaaagacgcgggttaattgtccttgaacacgatcattataagatgcttcaagtacaccactgcgttgagctgcacgagcaacgactttattttcaggttttttattaaattcggcagagaacttttctagttcctgcacagttaattcatgagccataaaaaatctccttttcattttataatttttttctcaatttaattctattttaaagcaaaacaaaagcgggttcaatcagaactcgcttgagagaattattaatccgtcaacttattagatttcttgcctatatctaataaattaatcaatttggatagaattgccatcattgccagcagtttcctttggcaaagtgatggtcaatacaccattatcatactttgcatgaatctcacttgcaactacatttggtaatctatagcttctagaaatactgccctcacttctttccttatgaatgatatttctatttttatcgctagtgtccttaaatgattttcttgtgccgctgacatttaacgtaccgtcattatagttaacgttgatatcctgcttatccatgccaggcatgtcaatcttaactagatagtccttatcagtttctgcaacatcagattgcataatgttttcaatttcattatcgtcaaagaagtttcttggaaaaccaaaccaatcattcattgtatccatcatgtcgttgcgccgattcatcatattgtttgccataaataaaacttcctttcatttttgtatttgcttaattagaatataaggaaaagatcaactcatttcttgatctcttttctccttacactgtttattgtagtcgctttttatagaaatgacacaaattagcactcaaaaatatatagtgctaattttagactgataacgctgctacaataacattctgagattgtagataattattacgtatagaaaaataaagaaagtttgtgaaatagaaatggtatattttcagaaaatgactccagaaggctatcaacaaattgaggatgaaattgctcgattaaaaaaagatcggccacgtagaattaaaattttgcaggctgcacgagctttaggtgatctttcggaaaatactgaatatactgaagcaaaacgtgatctaggtcacttacaaagtcgtctgcgttacctaggcaaacaattaaagtatgccgaaattgttaaagctgaagatgatggtaaggttgatctaggaaagaccgttgtgcttaagtttgatgacgatgatgaaacagaagaatacaaagtagttgggcgaatggaagcggatcttgctgctggcaaggtttcttttgattctccattgggtcaagcaatcatgaaaaaggaggctggtacaacagcaacggtggctgcaccagcaggtgaatatcaagtaacgattgtggaagttaaataagttgagaactataataaactgtctttttctggtataatatgggttttgtaggatacaattcagagtaggagtgaagaatttgaatacgccacaatcaagagagggtaatgtgatccgctatgccgtttatttagctggctatgtcgctgtgtttgcagtagtaaagctagttactagaaaatctccggttcatatttgggatttgattttattcggcttagttgcagccatgattctgttgttttatgtttatcgtttcaatcgagagcaacgcttttttgcccgtgattttaaacttccatggttgggcagtttgtcaactgttgttctattaacattagtgattacagttacacagatttcgatttcatacttacaatcatatggcaggattagtcattatgatttccaattgatatatgccaaaagtgaatcagttaacatgttttggtttttaatcgttgtccaaggaattgtattaccaatcctacaagaatttttggcgactggctttttgttcaattatgcttttcggcgaaatactaagcaagttgcaattatggggatcattgtttcaggtctgatttatagcttactgaactttcaaaattcagtagtactctttattattgatgcaatttatggcatggtgtttgcttggagctatatgtacacacaaacattattgatgccaatttacttagctgtagttagtggcgtacttacagtgattatgatttaaaaacaaaaggatgagaaaaattctcatcctttttttatacaaaaagcggatagcgtgaatcgaacccgcatctacagcttgggaagctgtcgttctaccatttaactatacccgcaatatgtttttattttagcattttttctatttgaagatcaacacttttacgatcaattaagctggtaaaattttgaaaaagccagcggcgtagttcgttgggcataacaactagaggcattctattatggattggcgccatatctttgttaggcgcggtagtaaccattgaaaaataatcctgatcataaatacctgcaattaaggtaagtggttgattagtgcggaaggcgtagctatcatggtatttacgaccgttttcagcaatatgggtagttttagcatattcaaagaatttttcggttaagattaagcaacgttgcttggcaaaggatttgtcccacattgaaggcgctgaatcataaaatcgctcaattctagcgttaaataatggcttttttggatcaacgggacttggatagccccattttttgttgtttaattgcaattgaccattttgataaagcaaaacaggtgctacttggttaggaaaaatatcttgtgcttgaatgtcaaaatttggtgtaactaagggcaggtcaagatcgcttttgagatattgttgaatttgttttaaattaggtaaacgaaactggttgcacatacgcatttcctttctttagggctagtttaatcatagcctattttttgttaaaattaggtaattaaacaattaatattaataaaaaaataaacttaaaaattagaaaagagcaaaaagatggcgaaagaaattttattaactggtgaccgtcctactggtaagctgcacattggtcactatatcggttcattaaagaatagagtaaaattacaaaattcaggtaaatatgatccatatattatgattgcggatacacaggctttgaccgacaatgctcgtaatccggaaaaaattcgcaatagtttgatccaagtagctttagattacttagctgttggtattgatccagctaaatcaactatttatgttcaatcacaaattcctgctctatttgaattgactgcttactacatggatttagtaactgtggctcggcttgaaagaaatccaactgttaagacagaaattaagcaaaaagatttcaaagactctattccaattggctttttaaactatccagtttctcaagctgctgatatcaccgcttttaaagcaaccgttattcctgttggagatgaccaggaaccaatgttggaacaaacacgtgaaatcgttaggacttttaaccgtgtttataattgtgatgttttggttgaacctaaaggttatttcccacctaaaggtcaaggacgtttgccaggacttgatggtaatgcgaagatgtcgaagtcacttggcaatgcgatttatcttgctgatgatgcaaagacagttcaaaagaaagttatgtcaatgtacacggatcctaaccatattcacgttgaagaccctggtaaggttgaaggtaacactgtctttacatatcttgatgtcttcgatccagataaggacaaggtggcagaacttaaggcagaataccaaaagggtggcttaggtgacgttaagattaagcgttacttaaacaaggtccttgaagcagagcttgcaccaattcgtgaacgtcgcgaaaagtttgctcaagatgaagatgcggtttatgaaatgcttctggaaggttcaaaaaaggctaataaagtggctaatgcaacacttgaacaagtccgtgacgcaattggtttgaactatttcaagaatagataaggctgaggtaaagttatgcacgatcgaattccttggaaacaatattttatgatgcaggcgctagtaattgcgcaacgctctacttgtaatcgcgcattagttggtagcgtcttagtaaaaaataatcggattattggcactggttataatggttccgtttcaggacaaccgcattgtgacgatgtgggtcatcaaatggttgatggtcactgcgttagaactattcattcagaaatgaatgcgatcattcagtgtgctaagtttggtgtttctacagaaaatactgagatttatgtgacacattttccttgctataattgctgcagatccttgttgcaggcaggcgtgaaaaaaattaactattattttgactatcgcgataatccattggcgatgcaactacttcatgatagcggggtgccttatgaacagattaagattaatcgcaaatacgtggaaagcttggcccataaacttgaagaagacgagaattaatttaatttggttaatgggactagtaactgtatttttaataacgacaggatttgtccagccaaatattgaagatcatgctcatattttagataaagaaactcgcactttgattacggaaaaaaataatcgctattttcagactaaagaacaaccgcaaattgtcgttataacggttaaaaggctgaataagttaacacctaagatgctagatcattctaagcgaacggtctttattgtggtaggacagaaaggtaaaaagcgtaatgtgcaaatttattcaactaaagatttgcatagtgccttcaccgaggtcgctcggggcaatatcttgcgtgctgaagtagataaattgcgtagtcaaaataatgcaacttttaacaagggaattcgcttcgtctttcgggcatgtgcgactagagttgatcaacaatatcaatatgcacttgataaatatgatttgacgcaagcagaacaaaataaagtcgcgcgtccacatagtgtagctttaccaatcgcactggcactggcatttttaattacgggaattacttatttcttgcgtagatttagtcatcgtgatccaatttctaagaaatagtcggcttgacttatttgcattttgtccttacactttttatagacataattagcgaaaaactgttaggtgagactcctacgtgaacacacgctatcgcccagaaacatccagagatgccaacgggttaaataggtgtcgtcgacttaaggcgagatccagatagctagcatgtgcttacgtcacgtagtgttaaaactgaacgacgagtatgacagagccttgtttggcaaaagtcacctgcagagttacaggtggcttttttgttttgcttgtcccaattaaagaagggagcaaataatgttaaaagcagctagcaagaagcgatcgaatatagacattcaaaggattcaacggattgcgcgtgagtcacgtagcgagacgctggcgcgtttacaggcgagtgctgaagggctttcgactaataaggctgaagaaaacagaagagaatatggcaaaaacgaaatcattactaatagcaattcctctaaatggcgcttattatgggaatcaatcgctacgccatttacgttggttttattagtattaactttattaaccctgtttactagctatattttggtgccacaaggagataatgacttaattactacgatagtgatgatcgtgatgttgattatctcggttctcgtcaattttatccaaaaaatcagaattgctaaggtaactgatcaattactcaatatggtatcagttacaacgaatatccggcgtgatggcaaaaatgtggaattgccaacagatgaagtagtggttggtgatgtaattaacttgtcggctggtgatatgattccagcggatatgaagttgttaactagcaaagatcttttttgctcatcaagctatttagatggggatcctgagccggcagaaaagatggctaatgtagtaattaagccgagtatggctaatgattatttgaactaccctaatattctatatgagggaacaactattgtttcaggctctggcaccgggattgtttttgcaattggcaatcacactgtttttggcaaagcagttcaggctatttcccgtaaaaaagtaaaaactaccctgtttgaccgggaaatgaagcaattagctaaaatattgattatcgcgacagcaattgtgattccgcttttgtttgtgattaatggcctgactaaggggaattgggggggaaagcttaattttcgctttgacagcggcagttggcttaacaccagaagtgttgccgattattgttaattccaatttaacacggggcgcacgggaaatatcccaaaatggtgctgtcgttaagcaaatgaatgctattcaaaatttgggctcaactgatgtgttctgtatcgataaaaccgggactttgacacaaaatcaagtggttttagagcgtcactatgatttagatatgcaagaaaccccacagattttgaagttttcatatttgaatgcatattatcaaactggggtaaaagatttaatcgataaggcggtaattgatgccgcgggcgatgaactagatgtaaacgaaattcagcgtgattacaataaaattgacgaaattccctttgactacactcgaaaaagaatgagcgtggtagtggtagataacgatgaacaccacgggcagcacttattagtaactaaaggtgccgctgaagggatgctggcaatttctaataaggttgaacttaatggaaaggttgaggatttaactactgcctggcgagaaaagatcttaaatcagattaatgaattaaacgatgacggtttacgggtacttttagtaggttataaattaaatcctgccccagtaggtgagttctctgctaaagatgaacatgatttaaccattattggctatttggcttatcttgatccgccaaaagaaacaactaaagaagcgctggaagatcttaaaaaagattatgttgatgtcaagatttttactggtgataacgaagcagttactcgtgctattgctttgcaggtgggattaaacgttgatactgtttatgacggcacccagatcgaagcggttagcccggaagagttgcgtgaaattgttgaaaaatgcgatatatttgtgcgaataaccccggaattaagagtaaaaattattaatgcactcaaagcaaacggtcatacagtcggttatatggggaatggcaataaagacgctttagcaatgaaggtagctgatgtgaccgtaacttcgaatacgtcagttgatattatcaaagagtcagccgatattatttttgagcaaaaagatttgcagctgttagaagaaatgattctaatgggccgaaaagtcttttcaaatacaatgaaatatattaagaccttcttggtaactaacgctggtagtgtaattgcgatggttgtttcatcgctgctcttgccatttttgcctcttttgccattgcaagttttaattttaaatttgctgtttagcataagttgtctggttattccctttgatagtgtttctaaaaactatgtcaaaaagccacaaaaatggtcgattaagagatggccgaagtttgtacttaattttggtccgattctagcaattattgattttatcgcaatgggcttgatgttttatgtgatttgtccatatttagtagggtctaattatcatcattgggtctttatgacactattttattcggggatttttgtggaatcgctttggacaagaattatggtgattcacactttgcgtgatgaacgttttccattctttaagcaacatgccacgccagtggtgttcttggtgaccattggtatggcaattattggtacaatgttgccttcatcaagtatcgcgccaagtttgggcctagctcaattgccgtttggttattggggcatagtcttcttgctagaagtaatctacattttactgacgactttggttaagcacttatatttaaaaaaagaaaaattctgatttgaattaaaaggaattgctggttttagcccaattcctttttttgcatgttaaaataaaatagatattttagacgattaaaggagtttgattaatcaatggctgataaagatactttttatattacaaccccaatttactatccatctggtcgcttaacgatcggtaatgcttatactactattgcagctgatacaatggctcgttacaagcgcagtcaaggctacgatactttctttttaactggtactgatgaacacggcttaaagattgaacaaaaagctgaagcacaaggaattaagccacaagagttcgtcgacaagatggcggcttcttacaagaaattatggaagagtctcaatatttcttacgataagtttattagaacaactgacaaagagcacgtagctgccgtacaaaagatttttgaaaaattattagcaaaaggtgacatctacctaggcgaatatactggctggtactcagttgaagatgaagaatactttactgaatcacagcttgctgaagtttacaaagatgatgatggtaatgtaatcggcggtaaggctccaagtggtcatgaagtacgtttggttaaggaaccatcctacttcttcaagatgagcaagtatgctgaccgtttggtggaatactacaaggaacatcctgaatttattttgcctcattcacgtgaaaaggaaatgcttaataacttcattaagccaggtttggaagatttatcagttacccggactactgttaactggggaattcctgttctaagtgatcctaaacacgtggtttacgtttggatcgatgcactttcaaactatattaccgctttgggctatggttcagacgatgattcattgtttaagaaatattggcctgcagacgttcacttggtaggtaaggaaattgttcgtttccacactatttattggccaattatgttaatggctcttgatttgccacttcctaagcacattatcggccatggttgggtattgatgaaaaatggcaagatgtctaagtcaaagggaaatgccgtttatccagaatcattgactagtcgttatggtgttgatccacttcgctattacttgatgcgtgctcttccatttggcgatgacggtatttttacaccagaagactttgttgaaagaattaattatgacttggccaacgatttgggtaacttacttaacagaaccgtgtcaatgattaatcaatatcaagctggtcatgttgatgcagttcccgttgctcaagctgaatttggcaaagacttgcaagatacagctgctagtgtcattaatgattatcgcgaaaatatggattcacttcacttttcaaaggcattagacaatatttggaagttggtttctcgtgctaacaagtatattgatgaaactactccatgggctttgaacaaagaaggtaaaaaggaagaacttagcaaggtcatgagcaatttggctgaaagcttgcgtttaattgctattatgattgaaccagtaatgaccgaaactgcaccaattatgttcaagcaacttggtttaaattgggacaatgaagacgctaagcatttggcctttggtgactttgattgggatgttaaagtaattgaaaaaccacaaccaattttcccaagacttaagatggacgaagaagttaagtacatcaaggatgaaatggctaaagctaagccaaagaagaccactagaagtgaacaaaagaagggtgacgaaatcaccattgacgattttgacaaggttaagatccaagtaggccaaattttgtcagttgaaccagttaaaggctcaagcaagttgctcatgttcaagctggactttggtaatggcaaggaaacccaaattttgagtggtatccgcaagttttatccagatgcaagtgagctattagacaaaaaggttttagctgttactaacttaaagccacgtaagatgctgggtcaccttagtgaagggatgctcttatcaagtgaaaagcatggcaaaattaagttagctcttgttggtgatgaacatgcagttggggctgaactcggctaatggagatcattgataatcatactcatttgaatgacgagccgtttcgcggcaaggaacaatattatttagaacgagcaaaagcacttgatgtaaccaaggttatttgtgcggggcaagatcctgactttaatcaaagagcggttgacttagcacaaaggtttgataatgtctatgcgatggtcggttactgtcccgatgtggctaaagactatgatcaacaggctgaagataaactaattgaacaattgaagcagcctaaggtagttgcaatgggcgaaatcgggctagattattattgggatgaatcgccgcgcgacgtacagcgtaatgtttttgcgcggcaaattgaagtagcacatgacttgaagatgccagttgatatccatactagggatgcatttggagattgttataacatcttgaaaaatagcaatctggaatatggtgctgttttgcatagttttaacggtggtgttgactggttaaataagtttttggatttgaatgtttacttttcatattcaggtgttgtttctttcactaaggctacggaagtacacgagagtgcaaaagctgcgccacttgaccgaattttagttgaaaccgacgcgccatatttaacgcctaagccatatcgtggtcatcaaaatgaaactggctacgtacgttatgtggcagaagcaattgctaagttgaaggatattccactagagaaagtggcggatgctacttataagaacacagtgagagtttatgggcttaaataaaaagaattttgatgcggtaatcgttgttgaggggaaagacgataccatccgtttaaaacaatttttcccaggaatcgagacaattgagactaatggatcagccgtttcagatgaagtattgaagcaaatccaaaaattaagtgagagtcggcaaattattgtctttactgatcctgactttaatggcgaaagaatccggcgcattgtaactaaagctgttcctgatgcaaagcaagcttttattacccgtaaggaaggcgaacctcataaaaaggggagtctaggtgtagaacatgcttcaaaagaagcacttgagcatgcactaagtgatttgcatgaggttgaaccgcaaaaaagtgatttaactccagcaatttatcggcaattaggtttagctggtggtagcggctcacgaaaattacgtgaacaagtaggcattaaattacgagttggctatggcaattccaagcagttttataatcgcttgcatacttttggcgtttcattagctgaattaaaggcagctgtcaaggaggtagaaaatgacaaataatattccaattggctctccagttagaacacaagcaattgttaaccgttactttgtcaaagctaaaaagaacttagggcaaaatttcttagttgatcagactgctattttaggtattgttgaagctgctgggataaaaaaagatgatcaagtcattgaaattggaccaggtattggctctttgactgagcaactactgttggcaggtgctaaagtttttgcttatgaagttgatgatagcttacctacgattttacagaatgaactgcctaagaaaattgatgatcagcctttggctagtcgctttaagctgatcttgaaagatctattaaaagcggactttaaggtagatattagtgacttctttgattttactaagccaattaaagttgtagctaacttgccgtattacatcactacgccaatcatttttgccttagctgaatcagatttgcactttacttcattgaccttaatgatgcaaaaagaagtagcagaacgattagaagcccaaccaggcagcaaggaatacggtccgttgactatttccgttcagaccgaaatgaatgttaaacttgctttgcaggtgagtcataattcctttatgccgcgaccaaaagtagactcgagcgtagttgtcttaacgccactgaaggaaaagccagcaattgaaaatcgtaagcattttatttgggtagtgaaaatgtgtttttcacaaagaagaaagacactcaataataatttaaaagctttgttgcctgataaaactaagcgtgatgaattatttgcggaattaggggtaaatccaagaattcgccctgaagaattaacaattaaacaatttattaaaattgctagctttattcctgcaagatgatgtataatattgaatttattatatatttgtgataaaatgttgctaaaggagctgttgtttagtgccaacatcaattatcacaattaaacataagttggattctcacttaggtgatactttaacagtagtagctcaagcgggtcgtaagaaagttactaagagacggggaattctaagagagactttccctgcagtgtttgtggttgatttagaccaacatcaaaataattttaaacatgtttcttacagttataccgatttactaactaagaatattgcattagagtttgatgatgaagctgaagaggctgaagcttaaacacaatttttgaaattgtcactagcatttatttaaaatgttagtgctttttttgccctttagagtatattaattaagtataaaccaaacattagaaaggagatttcatgaaacgttcagaaagattggtggacatgaccaaatatttaatggagcgtccccatactttaattgcactaccattctttgctaagcgttacggcgctgctaagtcatctatttcagaagatttagctattttgaagcacactcttgccagcaatcaagatggtattttggagactgtagccggtgcagctggtggcgtgcgctatattccatttttaggtaaaaaacacgcggaagcatatttgtcagatttatcaactaggattgaggatccaagtagaattttaaccggtggttttgtgtatctgtcagatattttaggcaatacgcaagatttacgtaaaattggtgaattagtagctactcattatgcttatgaagaaatcgatgctgtcatgacagttgaaacaaaagggattgctttagccaaagcagttgctcgttttttagatgtaccatttgttacagctagaaagcgatcaaaggtaacagaaggtgctactatttctgttaactatatttcttcatcgttgtctcgagtatcgaagatggaattaccgactcgtgctcttaaaaaagaagctaaagttttaattgtcgatgattttatcaagggtggcggtaccctaaccggaatggaagaattagttaaggaattcgatggtactattgccggcgtttgtgtactctgtgaagccgattttgacaaagaaaagctgattaagaactatctttcattagtaaaaattagtgaaattgatactgcccaaaagctgattgtagcagaacctggtaacttcttaactgaaactgattttgaccgtttctaaaatggtatactagaatcaagttttgattattaagaggttaatattaatggaaaaatatgtagttgttcttgccgcaggtaagggcacacgaatgaagtcaaagttgtacaaggttttacacaaagtttgtggtaaaaccatggttgagcatgttgttgatgcagctcaaggcgttaatcctgcagaaatcgttacaatcgttggtacaggtgctggcgatgtagaaaaagtactggcagacaagtctaagtttgctttccaagaaaagcaattaggtactggtgacgccgtaatgactgcgcgtgaagaattgggtgacaaagatggtgctactttagtagttactggtgatacaccacttttcacaactgatacatttaatgaactattcaagtatcatgcagaaaaaggcaatgctgcaactgtattgaccgcggaagctccaaatccatttggctatggtcgaattattcgtgatgatcaaggcaatgttttacgaattgtagaacaaaaagatggtaaaccagaagaattaaaagtaaaagaaatcaatactggtgtattttgctttgacaataaaaaattatttgaagcattgaagcacgttaataatgacaatgctcaaggtgaatattacttaactgatgttttagaaatcttgcgcaatagtggtgaacgcgttggtgcttacaagatgcctgactttagtgaaagccttggcgttaatgaccgtattgcattagctcaagctactaagactatgcaaagaagaattaatgaacagcatatgcgtgatggtgtttcatttatcgaccctgatactgcttatattgatgcagatgttaagattggcaacgacactgtaattgaaggtaatgttgtgattaaaggaaacaccgaaattggtagtgattgctacattactagtggttcaagaatcgttgattctaagattggtaataatgtcactgttacttcttcaactgttgaagaagctgaaatggacgataatactgacatcggtcctaattcacaccttcgtcctaaggcaattattcgcaaaggtgcacatattggtaactttgtggaaattaagaaggctgagattggtgaaaatactaaagtaggtcacttgacttatgttggagacgctaccttaggtaaagacattaacattggctgtggtacgatcttctctaattacgatggtgtaaagaagttccatactaatgttggtgatcatgcctttattggtgctggctcaacattgattgctccaattaatgttgcagatcacgcctttattgcagctgataccactgttactaaggacgttaataaatatgacatggcaattggccgtggccgtcaagttaataagccagattattggcataagcttcctctttctcaagataaagaatgggattaagaataaggcactagtgtatcaagctagtgcttttttgttaagaattgctaaatacttattgcaaaataataattgagacctacaataaggtgtactaataataatttttacatgaggtaggtaatacaatgaaattaagtcataagttagttatggtttcagcagctgttttgatgggtgttagcccagtattaggcatggcagaaaatactgtatctgttcaagctgctactaagagtactaatggcgtacataatacttacggtaaaaacagcaaagtcaaagtaactaagactatgaagtttgtcgaccgtaatggtaagaaaacttctaagactgctcctaagggtggtagctacactatttggaacgtcaagaatatcgacggtcaagtttactacagtattcaaactgatttgaagtactggattcctgcaactgcaactgaaggtacagtaacttataagtcaggcaatactacttatactttaaagagtgatggcaagaaggtaacaacttctacttcaactaagaaggctgttaagaagactaattcaaataaaaacactaaaaaagtagttaaagaatcaactaaaaaaactgccactaagactactaaaaaaagcaactcagaaaagactactaagaaaacttcatcaaagaagacgccagtggctaaggcagttaagataactactaagaataaggcttacgtttacgacaagaatggtaagcgtgtaaaaaactatttaggcactagttacattggtaaaaagatcactgttaaaggtttaggtactaagaccattaatggtgttaaatattatgctttgcaaccaaatcattattacattaaagcttcagatgtaactgttaagtaataattgataggaaaaagacactttttcgtttctaaattggcaaaaaaatattttagatctacaatatataaatgaactttaagtttagtaagaatgaggtatttatcgatgaaattaagtcataaattagttatggtctcagcagctgcattgatgagtgttgctccacttttgggtactgcagaaaacgtcaacactgttcaagctgctcctaagaagactacttcaaagaaggcagcaaacaacaagatcactttggtacgtaatgcttatgtgtacgataagaatggtaagcgtcttgataagtacatgggcagtgcaaaaaacactactattgctaaaggcgtaactgttacttcaactggcactaagactatcaatggtgtaaagtactacgatcttggtggtggtgcttatatcaaggctgttaacgtagatggtaaagctgcgtcatcaacttcatcactgtcaaagggtactaaggctaagtttgtttctaactcatacatttatgacaagaacggtaaacgtatcagcaagtaccaaggcaaatctaagtttgttaagggtgattcagtcactacttacggtattcaaaccattaacggtaagaagtattaccaacttgacaagaagggtactgcttttgtacgaactgttaacattgatggtaaaaccacttcaaaccaagaatcatctgtttcaaatgatgcagaatcaactaaaaaatatgactactcattaaagaagaatgcttatatttatgataagaatggtaagcgcatcaacaagtaccaaggcaagtctaagcttttaaagggtgccgcaattgatgtttatggcattgaaaccattaagggtaaggattactaccaacttgacaagaaaggcactgcttttgttaaggcaagtaatgtaactagaaccgttaaggcaacttcaattaccatgaagaagaatgcttatatctacaatggtaacggtgacaccaagaagaagacagttaagaagggtaagactgttaaagctactgaagcaagatacattggtactaagctttactacaagattggtgataatcaattcgttaaggctgctaatgtaggtaaaatttcaggcccagaactagaaccagttaacgaaccagatggtgctgctactgttgatactggtgataatactgtagatccaaacgtaaccaaggtaactacgattaatgttgctccactttacaacattaagggacaaccagataacgttagagcatttggcgaaggtcaaagtcaacaagtttcagaattgagatatattgcaacttctgcaactgctaccccagaattattctataaattatcaagcggtagaggctatttaaagcagtcagacgttgctgtaagtggtaagattttaactcctgttaacactccagaacaagctagagcagacgttacagttgctacagcagctgataagactaagttgcttcaagacattaacgaagcaactagtgttaagaactcagaagcttacaagtttgcttcaagtgatgccaaggctgcatatgatagggcaattacaaatggtactgctgttaacaacgatgctacagctactattgctcaagttaacgaagcagatgctgcaattgttagcgctaaggctaaacttaacggtaagaaaatcactgtatcaagcattagtaatttgactccagcagaagtaacttcaattgtacaattggttgcaactgctaataatgtaccagaaagttcaattcaactttcaaatagtggtgctttgacaattgttactaatggttatactcaagttttaaaccttagtgattatgttactcaaacttcagcaacttcaactaactagaaatgcataaaataagacgtagtatctgaaaggacactacgtcttattttttaggatattttcgttgtactagaaagtacaaatatattctaacttttttagcgattaatagttagtgcttttttatggttgcggcaaaattcttgctataattaaggagaatgtggttctttttagagcaacttttgctaaaatagagctggttaaatatttttacggaggaaattatgtcctataaagacgatatgatgatcttcgcccttaactcaaatgtaccattagcacaaaagattgcggatcgtgtgggtgttccactttccaagtctagtgttgaacgtttcagtgatggcgaaattcaaattaatattgatgaaactgtgcgtggtaaagatgtctaccttgtacaatcaaccagtaagccagttaatgacaatttaatggaattgttgattatgattgacgctgtacgtcgtgcaagtgctcgtacaattaacattgttatgccttactacggttatgctcgtcaagatcgtaagactcgtgctcgtgaaccaattactgctaaattggttgcagacatgcttcaagctgcaggtgctgatcgcattctttcacttgacttacatgcaccacaaattcaaggtttctttgatattccagttgataacttaatgggtgctccacttttggcagactacttcttgcgtaacggcttagagaaagacgctgttgtagtttcaccagaccacggtggtgttactcgtgctagaaagcttgctgaattcttaggttgcccaattgccatcgttgataagcgtcgtcccaaggctaatgttgctgaagttatgaacattatcggtaacgttaagggtaagcgtgctatcatcattgatgacatgattgatactgctggtactattactttagctgctcaagccttaattgatgcaggtgctactgaagtttatgctagtgcaactcatgctgttctatctggtccagctattaagagattgaacgattcaccaatcaagaatttggttttgactgattcaatcaatcaaccagcagagaagaagcttgacaagatgcttttggtatcagttggtccattgatgggcgatgctattaagtgtatccaaaaccatgaagcacttagcccattgttcaacaccagatacgaagctgacaagaacaagtaagataaaatttgataataaaaaatggctagccgatgaggttagtcattttcctgaattgtcaaattaagtgcaacagttaggctatgaggaaatatattgcttgaagagttcttctgctgtgtgatattgaaggattcgacgatgtttgcggttaatggcatcagttgcctgttgaacataagcagctgacttatctttcatgcttttgcctttagggaagaattgacgcagaagtccattgcagttctcattggtgcctctttcccatggagaatatgggtgggcgaagtagatctggcagcctttgatcttggtcatatccgcaaactcagagccattgtcaaacgtgatcgatttaaaccaggcaggatgtctgtcaatctcattttgaagcagcctttggcatgtgcttgcccgatagtcaggaatcttgataactacttcaaagcgtgtggttctttcggtcaaagtcattaaagcaggctgattcttgcgtctgacgcctttaaccagatctccttcccagtgcagcggcgtttttctgtcttcaatctctttaggacgctgttcaatggaattgccaagatgcttcttgtgcaaagcatgaccgctatggccgtgatgacgcttgttcctgcgtcttttgagcttcataggcagatcaatattgcttatgtccagcaagccctgatcaatatagcgatagacagttggtgtgctgggacaagggtagcctggcatagtccttttgaattcaccaacgaattcatcgatgctggtggcatcaaatttagctttaaagcgtctggagagcattctcaaaaagacagcataatgcttcaatggattgcgctgatagcagtttttgcgacgcttctcataataaatctgtgcagtatcagcgtaatagtgctcatacaataaatagctgctgtctctttgcaggacacttccgcgtttgatttcgcgactgattgtcgacttatggcagccgacttcttgagcgataacagtacgggaagttatgccggaatccagcattgcttgaatttgtccacgttgtacgctggttaattgatgatagtgcttagaaatgctagaatttgaattggtcataaagatcttcctttcttgatttttcgtcacttcaagtttaggtcttcatggcctttttgtttaacacttagtgttgcacttcaattttaaatccgggggttagtcattttatttttttttgaaaaaatcatcaccatttataataaataagagtgtattaaaatacacatgagaaacatctataattagagatagatgtttttcatttaaagaggacaaaattatgacacaatatttatcattcgatattggcgggactaacttgaaatatgcattaattgatcaagaagggcatattcttgaaaaagaccgggtaaagactaatactgaaaacctagatgcattcatgcagacgatgtatgaagtcgctgacaagtatcaaggaaagttcgctggcattgcagtctgtgctcctggtaagattgatactaagaataaaattatctattttggtggagccttgccattcttagatggcttgaatttagaagagactttaggtaaaaaatatgatgtaccagttggcgtagaaaatgatggtaaagcagctgctttgtcagagcaatggctaggcgaattgcatgacgtcaatactggtatcgcaattaccttaggcactgctgttggcggcggtgtcatagttgataatcgtattttacatggctggacttttcaagctggcgaattgagttggatgattacgaattcaagtattggtactaggaatatggctgcttatgctggctttagttgttctgcggttaatatgatcaaaaaagttaacctggctttggggaatatcgatcttgataacggcttgaccgcgtttgaggcaattaacaatggcgatttaagagcactagccgtttttaaacgctattgccgcaatgtagcaatcatgatcctcaatattcaggcagtaatcaatggctctaaagtaattattggtggcgggattagtgcacagccaattttgattgaagaaattaacaatcaatttgataaaattttgcagaataatccaatgttgaataatcaagtgattaagccggtgattgtggctgctaagcatggcaatgattctaacttatatggtgcactttatgcattactgttggaattaaatgacgaagaagttaggtaaatattgcaacacaaaaaggggatgcgtcgcatcccttttttacatgagctaaataataatttaatctttgccagaaacaatcttggcaatcgcaatgctggcaccagcaacgcaagctaccatggcggttttacaaccaatcttgactacgtcttttaccaaatccttattttcatgaatgaagtcaaaagacattttagtatagtccatgcaataaccatgaactgtgtccatcaagtctttaacttgagtatagccgctcttaggttctgcctttacttcatcttctggattaatttgagttcttacatctgtatttaaatcatttctgttcatcataaatacctcgattctaggatttaccttaattttacttcttttgctcacgttttggtcttctcaaatatcttaaggcaccattcttaatatatttttgaaattgctcataaagtggatcgaaaatttgcggctgatcttcatcgtgactgagcatagttttagggaagaagaagcgttcatctccttggaaagtaccatttaatgcgcgaaccaatgggctgagttgggataactcaatcatgctgccgtcgtcttgcataatttcaatttgactattagcatttttccccgttggcttataagcatcatatggttcatcgaatgcggaattggtagcggtatagtaatcaggattaaagccagcttgcttgattaggctcttgagcttaggtaaaagatttttggtttcttcatcgattcggacactagctagcggttttctgtacaagtaacgcttggctaggtcagataagattggatcttgtgcctgggtccacatagaaaaattagtttccattactccatcatcaagctttaaataatcgtctaaagtccaattgccttcaaggaatttagtcaagctaggtgtaacttgcagatttccctttttataaacagtttgagcgcgctctaaaaggtgatgcaagatgacttccattgagcgtcctacgcggtggaagtagacctgttggtacatctgatagcgtgacacgatatagtcttcaacggcatgcatcccattgttggcaaaacaaataccattttgataaggacggattacccgtaaaattcttgataaatcgaacctaccatagttaactccggtgaaataagcatcccgctgcaaataatccatccggtcagcgtcagcttgacttgagatcattttaaccacttgcggattaggataagtcttagcgattacgctggcgactaattcaggaaagttaggtgcaacttgttttaatgcatggttaatttctgtattaggatcagtaatgatcttttgtccaattttttcatgattggtgccaaaaaggtgctcgaatgtgtgcgaatagggcccgtgaccgatgtcatgaagcaatccggcacattctaccagtaatcgattatcatcgttccagagaccgtctcctggcgtaattgagggatattttttgctaaagatatcgcaaattcttctcgttaattcataaacgcctaagttgtgctcaaatctagtgtgagttgcacctggaaaaacatagctaacaggacctaactgtttaatgcgacgcatgcgttgaaattctttagacttcagtatgtccaaaacaactttatcttcaatatgaatatagccgtgaaccggatcacggagaacaacctcttgttttaatttttcgctttgaaatcttgtcataaaaatccaccaagtttaatttattaattttttgaactatatataataaaatagattatatctaactaaaattatatcagagatatagtaataatgtttaaagggggcgcttgtttgacagcaattacgattgatttgactagtaaaattactcaagacgatgagacagagacttttacgcgacatgcgcaagggcaattgactgaagaaggcgacgtcacacgaatttcttatgccgaagaagggcaaattccagtgaagatgcttctaaaggagaatgaattgttgattcgccgcggcgttgacagcaataattattctttaatgaaatttattccgggtgaaaaaggcaactgccgctatgtagttgaagggcgccgcatggacatgaccagcgtgactaacttgcttgaatatcagagtcaagatgatggttcacgtaaacttcgggttgaatatgacctctttaatggactatacttaataggtaactatgcagtcacgttgatttttacttaaaggcctagtagaatagtaaagattgtataagagaggacgtacagctgtgggattagacaaatttaaagacaaaaatcgcgatgaattgtcaatgatcgaagttgctcgtgcaattttggaagacaatggcaagagaatggcatttgccgatattgttaatgccgtacaaaaatacttgaataagagtgacgaagaaattcgtgaacgtttaccacaattttatactaatatgaacactgatggtgaatttatctcaatgggtgaaaatgtttgggcacttcgttcatggttcccatatgaatcagttgatgaagaagttaatcaccctgaggatgaagaagacgattcacgtaagcaccacaagaaggttaatgccttcttagctagcgctactggtgatgatgacattatcgactacgataacgatgatccagaagatgacgacttagacgccacagacgatgatactgatgatgtattgccagatggcattgaaggtcaattgtcacaattaaatgatgatgatgatgatgacgaagaagataattaatttgcttgacttaagaagaaaaagcagataatatttttgttgggcaccctatgtgcgtttagctccccgttagtgggagcttttttgtttaaaggataagttaaaaggagcagaacatgacaaaatacatcttcgtaactggcggtgtcgtatcttcacttggtaaagggattactgcatcaagtttaggtcgacttcttaagaatcgtggcttgaaggtcactatgcaaaagtttgacccatatattaatattgacccaggtacaatgaatccataccaacacggtgaagtttatgttaccgacgatggtacagaagctgaccttgacttaggtcactatgaaagaatcgtagatgttagaactagcaagtattctaacgtaactactggtaagatttaccaagaagttttggaaaaagaacgtcgtggtgactaccatggtgctactgtacaagtaattcctcatattactgacatgatcaaaaagaagatcatgcgtgcagctttgactactgattcagatgtaattatttctgaaattggtggtactgttggtgatatcgaatcaactccattcatggaagctattcgtcaaatgcgccgtgaagttggtccagaaaatgtaatgtacattcactgtactttggttccacttcttcacgctgctcatgaaatgaagactaagccaacacaacactcagttgcggaattgcgtagtattggtattcaaccaaatatgctggtacttcgtgctgaacaaccaattgaccaagaacacaaagacaagatttctacttttacagacgtgcctgttgatcgaattattgaatcaattgatgctccttcattattcgatgtgcctttgaacttccaaaagcaaggcatggatcaaaaagtctgtgatttcttacacttagagagtccaaagctagaagctgacatggaagcttggaagaagcttgatgaacgtgctaagaccttgaagcatcacactaagattaccttggttggtaagtatgtagagcttgaagacgcttatatttcagttactgatgctttgcaacatgctggttatctttacaacactaagattgatgttgataaggtacaagctgaagacgtaactgaagataatattgcagaaatcatgaaggattcagatggtttgattgtccctggtggttttggtactcgtggtcttgaaggaatgattactgcaattaagtatgctcgtgaacatgacatcccattcttaggtatttgtttggggatgcagatggctagtgttgaatttgcacgcgatgtattaaaccttgaggatgctaattctgcagaagcagagccaaactgcaagaataatattatcgacattatggctgataagcgtgatgaagaaaatattggtggtactttgcggttaggtatttacccagctactcttaagaagggaactaagactcgtgcggcttacgatgatcaagatgttattcaagaacgtcaccgtcaccgttttgaattcaataatgaataccgtgaagcctttgaaaaggctggtatggtcttctcaggcgtttcaccagataaccgcttagttgaaattatcgaattaccaaagaaaaaattctttattgcagcacaatatcacccagaatttttgagtcgtccacaacgtccagaaggcttatttaagtcatttattggcgctgctagtggtcttccagcacaagaattttaaagtgattaaagtttgattatacaaaatcttaagaaaacaagaactgagagacctcagctcttgttttttttgtaaatatcctttaacattattatgattaattgaaagtagaaaaggatttgttttcgccaatgaagcagatgataattcatggtggaaagcccctgcagggtgatgtttggatcggtggagctaagaactcaacagttgctcttattccggcatcaattttatcaagaacaccagtgaccttggaaggcgtcccaagaatagctgatgtagttaacttgatggacttattgagtgagatggatgtacattgtgatttcggtgaaaccactttaagaatagatccaactgatatcaagatgagtccgttgccagctggtaagattaagagtttgcgcgcttcatattactttatgggtgcgctacttggtcgctttggcaaggcagtagtgggcttccctggtggtgacgatattgggccacgtccgattgaccaacatattaagggctttgaagccttaggcgctagcgtaaaaaatgaaaatgatcaaattataattactgcaccagaagatggtttgcatggagcaaaaatccatttaaagatgccatcagttggggcaacgatgaatattattatggctagtgtgacggcacagggccagactataatcgaaaatgccgcaaaagaaccggaaattattgatttagctaccttcttgaacaatatgggggcagttattcgtggtgctggtactgactctattcgaattgaaggggtggagcagcttaaagcacagattcctcatacgattattccagacagaattgaagcagggacttatgttgctttagctgcctgtattggtaatggcattcgcattcataatattatcgaagaacaccttgattcatacctggctaaagttgaagaaatgggtgtagtaatcgattcagatgaagattctttgtatgtttacccagcgggcgacctaaaaatggtccaggtgaagacagatgtttatcctggttttgcgacagatttacagcaaccaattacaccacttttattaactgctaaaagcggtgaaggtgtagtaatcgataatatttatcctaaacggattggtcatattgctcagttgcaaaagatgggagccaatattaaagttgaagataatattattttggcccatccaactaagcagtttcatggtgcggaagtaactgcaggtgagattcgagcaggtgcctgtctgatgattgcaggcctgatggctgatggtacaacaacgatcgacaaggctggtaatatcttgcgtggttatgatcgggtccaagaaaagctgcgtcaacttggagctgatgtaactatcaaggatgatcctgctgtaccgggtattttagataatatttagtaaataaaaaccacatggaaaatctccgtgtggtttttgtaatgatatgtcgatttgtaggtgaacaaatgagtttaatttttacaagacgtgcacaaaattcagatgtggataaaattgtgcaaattttaaatgatgcgacttcttttttaaaggaaagtggctcatcgcagtggcaaagtggctaccctaatcgagcaactgtagaagatgatattaaaaatgggtgtgcttgggtattaactgtggataatgaagttgcaggttatgcggcagtggtaattggccgtgagccaacttatgcggatattgaaggcaagtgggaaaataatgtggacacctatgcgacaattcaccgcattgcagtttctagtaagtttagaggaatgcatttgagtcaatttttcttgagcaatattatttctctaacttatgcacaaggaattcacaattttagaattgatacaagccggaaaaataaaattgtccagcacattgcagttagtcataattttattgaacgagggattattcaagtaactgaagatccggttgattcaagtagaatagcttacgagttgaatttaaggtaatgaaaaaccacatgggatgtgaattccatgtggattatttttttgctttatttattaatcaagcaagtcgtatttcaaagtcattaaaccatgaccttcgtcaaccatttgaccaagcagttcaacagtgttgttataaactgtatcagacatcttttgattagcagcaattaacttgtcttgtaattccttacctgaaaggttctttgcttctttgtcagtatcatgttggatcttgtgacattgtgctaaactcttttgttcaaaggcgtcttcaagttcaccgtaaacacggtagttggtatcgcctaattgagcagttaacttgttaagccagaaaatcttgctcaagttaaacttaggagtggtttgccaagcttcaggggtagtagtgatattagtatagaatggcaccattgagttaaaggtgttaggaccaaaggctaaccattgtacacctgcaatttctgcaggaacatcattacgaatttgcaaaatatgggtttcaaagtttctgttaataccgataggacggaaggtcttcttttgttcaggagtaccttgatcgccataagcatcgtaaggagtgtcttggtagtgtgagctttcggcccatttaatatcttcaattgagattaaacgattagcatggcagataaaaggttgatcttgatctgctggagtaccaccaaagtctggatcgaaatagttgtgaatataccaagcacgaggattattgtagtgagcatccttaatagttgaagaaccaaagatgtggcgcatgttgtagccttcacggtctggattcaagtgatattcttcgattaaatcctttaggtctgctgaacaagcaaaattatcagaatcgttgaagtcgaaagtatcaatattcaaacggtttggtgcaataacatatgcatcatctgggatacggcgtgcaatccaatgatgaccaccgatagtttcaaggtaccaaatgttatccttatcagaaaaggccataccgttcatttcataagtaccgtatttttcaactaaatagccgacacgtttaacaccgtcaaaagctgagtgcaagtatggtaaagtcaaagtgacgaaatcttcttcaccaagaccaccttcacttggatcaagtaatgggtcaacaccttggatgcgtgaattagtagtgatggtttcagtagcggtcatggctacattttcagcgttaattccagctgcgccccaaataccatttttgcctgaaacatcaggtgctgaagtatagcgtaatggtgtttctgctaaatcagcgtcgtcaatcttttgtttagaaattacactagtgtagtgcttaggttggtcagctgggttaacagctttaaagccttcagggatgatgacgcgaccaccgtcttcactacgagcgatcatcgtagagccatcaatagttgcttttttaccaactaaaatagtagtacattctgtttgtttcattggatcattcctttacttttattatgtttaaattatttcctaataatattgtatgcaaaaataatccgataaggcaaagaatataattaatttccccgaaaggcatttggactaacaccgctatagcgtttaaatgccttggagaaggtaaattcatcgccgtagccgactttttgagcaacttgccttagattgtgcttggtattaattaattcttttttagcggcttccatgcgcaattgcatgaggtacttttgcggcgataatttagtgttttttctgaacaaagcatataaaaagctgcgtgatactcctagcctatgacaaagttcaacaatattgcaggtaggatcggtataattttgattaagataattaatagcgatttgatattgatcatttttaggtgttttgcggactggtggatggttaggaaagtcttttactagatgataaaaaagttgataagttaaagctgaaatttttaaattgtttaataaggtctttttcttcgccaaacattgataaaggtcatctagggtttgataaaaggcagttttttgaatttgacgcaagaaatttttattaggtaaatttgatgccttgatgctttcattaacgccgttgccagctaggccaatccagaagtattcccagggttcattgtggtcagcttgaaaggaacaagtttgactgcgtggaacgtaaaaaagatcgccagcttttaatttaactgcgtggtgtctactagaagtaaaggtaccagttccgctaataatgtaataaaaaatatcgtttttacgaagattgtcaccttgaaagaattcatcgggctgacatttttgtcgaccataaaacatgatgtagctatcaagattttggttatttaagttaggcatagacttcctcactgttgaaaaattatgttacttctattatagaagagattttgcttaaaaggtgaagaatgaaaaacgaccacattaagcggtcgttcgtgaatatttatagaaaattatgatatggaattatgaaatgaaaaggtattttacttattggcaccacttcttccattgaataaaagattaagcagagttgcacagatgctggctacgacgataccgttgcctaagaacaattgaatggtttgggggagagtttggaagatttgaggatagacagtaacgcccaatcccatcccgattgaaatggcgacaattagaatattgcggttgttctcaaaatcaactttggttaacattttgattccttgcacggcaatcattgtgaacatgaccaacatggctccgcctaaaactgagtcaggaatgatggtaactagagcaccgattttaggaagtaagcccatggccattaataagccagcagcccagtaaatcggacgcttagtcttaatgccggataattgaagcaagccgacattttgagaaaaagtagtgtaagggaaggtgttgaaaagcccgccgaagatttgtgctaatccttctgcacgataaccttttttgaggtcttcttcggtgatatcttgatgaagtaggtcgccaatggcaaagaagacgccagtggattcgaccaaggaaactaaggcaatgatgatcatggtcaaacaagatgaccattcgaattctggcaccccgaagtagaaaaattgaggcaaatggaaccaagaagcttcggcaactggctttaatgaaacaagtcccatgcagctagcgattagagtaccaacaattaatccaattaaaacggaaatggaacgtaagaatcctttagcccagacttcaatgacaacgatgatgaggatggtgataaaggcagcaataagatttttcgcatcaccaaagtccttggcttgggcatttccgccacccatgttttgaaaggccacgggaatcaaagttagtccaataactgtaattaaggtcccagtaactactggcgggaagagttttttgatttttgaaaaccatccggcaattaagaaaacaaagattccagcaacgataatggcaccatacatcgtgttaattgaaaacttctgcccgatcatttctaagggagctaccgcttgaattgcacagcccaaaacgactggcaagccaatgccgaaatatttattacggaatagttgaattaaagtggctaaaccacacatgaagatatcaatcgaaactaggtaagtcatctgtgtgctattgaagtgtagtgccgtaccaattaaaaggggaacggcaactgcaccggagtacattgccagcaaatgctgcaaacctaggacagcagcttttttgtgactaacttctttttgtgccatttttaattattcttctccctcgaagtgtacttgatcattttcaaagctatcgatttttgctagggcttcaaagcgtaagccttcgttttctacccattcgcttccgccttggaaggtttttgcaacaacagcaccaactccaacaatgtcgcagccggcttgtttagcaatgttaaccatgcctttgactgcttcaccgtgggcaacgaagtcatcgatgattaagatatgttcgcctgggtgcaaaaatttctcttcaacgcagatcttattgttgaccttcttggtgtaagaaaagacgtcagcccaataaactgcatcattcaaagtagacggctttttctttctggcaaagatcattggcacgtgcagttggtaggctgccatgacaccaggagcaatcccggacgcttcacaagttaagaccttatcgactttttcatctttaaaaaggcgggcaaattcttcaccaacatgcatcattagttgcggatcaacttggtgattcaaaaatgaattaattttaagcacatttccaggtaaaacttcaccatcttgtttaattcgatctactaattccttcaatattattctcctcaagaaagaaataaggacttcttctacctaaaacaggtaaaagaagtccttaagattattcttaactttcattcacctatagtccggtatttacggtaccgggtagagactgtcgaccttatttcgacgatatatagatatttgtgttggcttaatcttaacagaatatattgccgaacacaagtggaaaattaaggattaatgttcgattatagtaaaaattattcagctgcgatatcgttatggcacagactgatgatcttttcgataatgccatataagatccccgcgattggccagatgatccagctgcgttcccaatcattggtaatgaagctatatcctagataaagtaagactgctattaaccaatagagtgtggcgtatttgttcataatcttgcgacagccggttaattggattgttaaattgcccaggtcaagcataatagctagggcagtagaaaagcaaaggatggctggactgcgaataattaaactaatggctaaagcgcgaaggctggcacttttttgagcagctgttaagtagccttgctcttgttgatcagataaaattggcaattcttcagttaagttattatctttgtggtttaattcaaaagaaggtgagccgcttttgagtaaataatcggtggtcactccaaataattctgataaagctacaattttttcaatatcgggaattgattgttcactttcccatttggatacagcttgccgactgacattcatcttttcagctagtgcttcttgaaaaagatgatttttcttgtgtaatgccgcaattttttgacctaatctcatgattgatcgtcctttcgttttgaaataatttgatttaacgaaaatttgcggttgcagaccaccactttttaattgcatttagcgcaactagtagttgcaactgctggttgctcaagataaaagccgaacaatgaatggctatttttaactttttgattgacctttttaatttttcctagtagagttagttaaaaatgcgtaattgaaaagagggagtaaatagtggctaagaatctagacgattttgataaaattattgtgcttgacttcggtagtcaatataaccaattaattacccgccgtattcgtgacttcggcatctattctgaacttttaccacacgatctttccatggagaagattaaacagatcaatcctaagggaatcattttctcaggtggtcctaacagtgtttacgataatggtgcattaaaggttgatcctgcaatctttaagttggatattccaattttgggtatttgttacgggatgcaattaatgtctcatgacttaggcggtaaagttgaacaagctgaaaacaaggaatatggccgcgccaacattacggttgaagatccagacagtattttgttcaatggcttgccttcaaagcaatacgtttggatgagtcacggtgatttggtaactcaagctccaaagggcttcgaagtaactgcctcaagcaaaaactgtccaattgctgcaattgctaatccagataaaaagttttatggcattcaattccacgcagaagtgcgcaattcagaatacggtttagacatcttgaagcactttgcttttgaggtttgtggtgctgaggctaactggaccatgaacgacttcatcgacatgaaggttgatgatattcgtaaggaagttggcgacaagaaagtcatcttaggtctttcgggtggtgtagattctagcgttactgctactcttttacacaaagcaatcggcgatcaattaactgcaatttttgttgatcacggaatgctgcgtaaagacgaaggcaatcaagtaatgcaagccttgaacaaggatcttggtgttaacatcattcgggttaatgcccaaaagagattcttagacaagttgaaaggtgtaactgatcctgaaaagaagcgtaagattatcggtaaggaattcatcgaggtctttaacgaagaagctaagaagttaaaggatgtagatttcttagctcaaggtacgctttatactgatgttatcgagtcaggtaccaacactgcccaaacgattaagtcccatcacaacgttggtggtcttcctaaggacatgcatttcaagctgattgaaccactgcgtaagttgttcaaggacgaagtacgtgaacttggtgaaaagctgggcattccacatgacttagtatggcgtcagccattcccaggccctggtcttggtatccgtgttcttggtgaagtgactgaagacaagcttaagattgtgcgtgattctgatgcgattttacgagaagaaatcaagaaggcaggtttacaagaaaagatctggcaatacttcactgttcttccaggtattcgctccgttggagtaatgggcgatggacgtacttatgactatacgattggtattcgtgccgtaacctcaattgatgggatgactgcagattttgcccaaattccatgggatgtacttggtcacatttcagatagaatcgtcaatgaagtagataacgttaaccgcgtagtttacgatgtgacgagtaagccaccttcaactattgagtgggaataatttcgtaccttaataagaagaggaaatcccaatatgacggcatttgaatagggtcaatattagtggaaagtaccggttgaaagcaagttgtctaccgtttttctaccggtagaagttgattttaatcagcatgaatagtgcattaaacgctactattacctgttcgttattttggggttgtctaccgaaaattgaatattttgcttacttttgttgaaaagtaagtgactgttgtcctacttattgtcatttgataagtggggcattttttttctctttgttgccacaaaagaaatgctgaaatccaaacggagcagtctgtttgatcgttgttgttacttatgacgaaaacataagtaaatcagatatgaaatctcgaaatgaccttgaatgaaatctcaaggtactcattctcgaatgcaatatctgatcggtcgcaaccgaaggctgaaaatttattttgccgggacggcaaacatgagggggtcattgcacgatgaagccgttaaaggatgagctaattcaaagtcgacttgatgaagatgaattagcagattttgataaagtgaagaaactgctcgatgtgaagagtaattctgttgcaattcggcagatgattaaagatgaaatgagaaagccagaaatgaatggaagcaaggtaatactgacgttgtatcagcgttattaaccaagctgtctgctgaaggtcgcctaccattgtcagaggcgttgatgggtattacaggtactaaaacatcatcacaattgagtatcttacaaaatcagttcgccgatattcaatcacagttagaaagtattatgtattcagtgacaaaaatggtcgattgaacaagtggctcatgtagttagaatcgcctacaagaccatctacaactggattgagcaaggagtattggatattggcgtggctgatttacctgaccatggaattcgccgccgacgagccaaagaaacccgtgggacttttagccatggacgttccattgaagatcgtcccgctgaagttattgaccgtcatacctcaggtcactttgaagcagatacagttttatctggaaagcgtaaaggtcaagcaatagctacgtttgtcgagcgtaagagtcgtcttatcatcgttaaacggcttcagggacgagatagtacctcaataaccaaggccattttagaattagctaaccagttagaagataatctcaagccccttactgttgaccatgggaaagaattcgctaactacaagctaattgaaaagcaggccaggattcccctatactttgcgcatgcttattctccacatgaatggggcagtaatgagaatcgcaaccgagtactacgacgctttatcccaaaggtcaaccgattgagaaaatcactgatgatgagttaattcaaattaactggtatttgaactccaggccactcaaatgtttaaactggcgcacactaattgagatctttttgcgtaatctgcgtcactaactttgttcaagttatttcttgcaatctgccgtttgaaaagagattagccttggcggttagtctcttttactatctggtaagttgactgcaaacagaaaaaagagccaagccgtcatcaaagtcgctaaaccgtgctataatgttgtcggatttaaaaataccactagttattaaatttgggaggcaaaaataacgatgaagcaacttaaatttttagaaactaagcggacaccgcgttatagtttgcgtaagtttagcgttggtgtggcttcggtattattaggagtaaccatttttggaattaactttacaaatcattctgtaaaggcagcaaccatagaaagcgttaaaacttccaatagttcaccagagacgcaaggtagtgcaagtaacaatgcaacagctaataattctacagaagctgcgacaaccccacaatcttcaccagaaacgcaaggtagtgcaagtaacaatgcaacggctaataattctacagaagctgcgacaacctcacaatctttaccaaagacgcaaggtagcgctcacacttatattagatcattagcagcaagatcagcagcaagattagcagctacgaattttatggtaacttctggttctgacagaaatgcagcaggtacagtagatcaaaataacattaatactcagctagctaaagaaaatcaagaattggccaataaggctaatctaacttcttcagataactacagttctaatatctataaaggtacagatggaaattattacaagattgtaactatttatggtcaggactacgtttaccgtgctgctgatattcaagctagtggtgctgattttaagggggatcctaaacaaacagctgaagatactaaaaataatatcaatatttctaaagaagatttaggaaatggtaagacccgttggaaggttgttttcttccctaataagggattacaaaatgttggcagtaaattaagtgggttaagttctgcaaaatttggtattgccctcacttctgactaccaaatcgttggtaatgttgacatgaaagtaattagtaatcctaatcaaacatttgaatcttatacatttgagcccggtagcactagcgctactgaatttccaatacaaaatctaaaaactgaaaaagacttttcatttaatcctaagacagatgttgatccaaatactggtttaattaatagtgaaaccatgccagcttataacaatcaatatttgcaaggcccatactatttcactactgctactgatgttggtgctaagaacttatggcagacttactttaaagatgctgatgaacgtaagaatgcatatgatgggtccccttatctaggtggcaatcatgactttcattttaatacttttaaaattgcaaatgaaactggagttgacggtgcaaaatataaagacccaatcatttatgacaaactggggtataggttaaattctaaaaacggtgtagctaattctaatggcgtatatagcagtgataactttaaccaagcaatgtcatttaagtcacaaggtgtcactagtaatgcacaattttcttcttatgttatttcctttactacgcaacacacagactctcatgaagtagaattaactacaggttcgaaaaatcaacaattctcaggaatcgcagctaatatttattcttatcagaattggtactatagcatgatgtctagcttatatggtgagcagagagcactggatccagctggtgcaccaaaaacacctaaagatgttatttctggttgggttgatgccactagagctctggatgagattaagaaagactatttaaataatgctcaaattaatgttttgcggaataaaattctaaataacattacagactctgatgctgtaaataacattattaaagaaggaaattccttaaacgatgctatgaaaaatcttggtaatagtatcggacagtatgatcctgatggcagttttgctgatcacaaggaagatacaacaaagaaatctgatcgctataaatacgcaagtccagataaaaaggcagcttatgacaatgcaactgaagtaactaaagctttgattaacaaagatacaggtacctatgcagatcaagcgacggtagaacagcttactaaagatgaaaatgatgcttggaacgaacttaatggtgtcaagccaaaggataatgaggttaactctccggtcggtggtaccattactattgaaaagggacatgcattagattcaactgatgccgctaatgcaattaccaataaggatagtttgactaatgtaaaaagttattcttggtcgggtactccagatacaagtaagccaggatctattagtccaaaagtaatagttacatataatgatgatagtgctgatgaagtacctgtaactgttaaaataaaaggcgatgctgacaagtacaagagactgtaaaatagtttgtgtaaggatgaatgattccttaaatttatttctttaaacattagaaaaaggagttcctttctcgtatgattggtttgaacaaaaaaacacatacagaaagaagaactccttcatgaatgattttaccaaagattttgctcaagctctattcaatccagacaaaataaatgatttattgcgcaaagagctacaacaggctgttaataacttgttagaagctgaattgactgcctttctgggctatgatccctatgccagaaatggctggaatactggcaactctagaaatggtgcttatttccgcaaagttgatacgcaatttggcccaattgaagtgcaagtgcctcgggatcgcaacggtcaatttcatcagcacacgctgcctgactacaagcagcactcggatatcttggaaagcatgattatcaagctttactccaagggcgtgaccaccagggaaatagccgatctaattgaaaagatgtatggcagccattacagtccagctcaggtatcaaatatttccaagcagatgattccaaaggttgaggcttaccacaaacgcaagctaagcgacaagtttttctgcgtctatttggatgcgacataccttcctttgcgccgagaaacatttgagcgtgaagcagtctatattgccattggcatcaagcctaatgggcacaaggaggtcattgactactgcattgcacctagcgagaacattgaagtctggacagatatgcttcaaaacatgaaatcccgaggcttaaagcaagttgagctttttctttctgatggtgttgttggcatgaaaacagccttggccaggacttatcctaaagctcattttcaacgctgtttggttcatgtcatgcgcaatatctgcgctaaagtacgcgtcgacgatcgtgaaaagatcatgaacgaattcaaacaggtgcatcaacagacaaacaaagaagaagccacagctgtcctgcatgacttctataccaaatggggcaaggtttacagccatgttatcagaagcttgaaagacatagaaccagatctgctggtcttttataactatcccaagcagatcagagcttcaatttattcgactaacatgattgaatcatttaacaatgtgatcaagcgcaaagctaagcctaaggcagagtttccaactgaacagtcgcttgatgcttttattggcattcaggcaatgagctacaatgaccgttatttcaatcgaattcataaaggctttggtcaggttcaggacaccttagaatcctactttgattaaataaataattaaaaaatcaatttacgagaaagaactatttacacaaaagatttgacagtttcggaaaaaatcctaatgaagaaacttaatatattttattatgctaccatttggagttttattattggaatatgctgtgctacatatttaaacttaattaattttattattaattttgtctggcatgttttgtttgataaattacctgttcctagtcaggctttaccgttttttatttgtattccttttggtttcattattggtatattaattaagcgtttaggatcatatccattaactatcgaagaagttttaatgagtgttaagcaggagggaaagatcaattatcacaattggtggaaatccttaaccttaggtcttatttctttagccgcgggtggcagtattggaccagaggcttcaactactgtactaggaagtggcatggttaattggctgggagatagattacgactaattgcttattcttctgattggaaatggaatcatttttgggatactatcgtttcgaaaaaacaactaaaaaaactgccaaaatttagtagcctttttaaatcaaaattgtatcaaaaagttttttgcttaattatggttatgatcggcgtggttggtgcagcaatagtctttaaattattccctgaagaaggattatttggtattcatcatcgccatattctctggcaatggcgctatagtatgtatgtaattattctattaattgtaggttggagcttcggtatgtttttcttatggagcgaaaaatggagtgattattttgctaaaaaaattactatttcaccgattattaaagcaactatatggggaatagttcttgcattacttaccttaattactagttatgccctgtattctggtgaatttcaaattgttccatttgtacaccaggcgttgcaaatctcaccattatttttgctagttatagcagtcatcaaaaccttgtctactaatataggttttagtttaggctggcgtggtggaaaaattttcccttcgatttttgctagtgtagcagttggcgcagcgattgcgcaatttttaccaattatgccagttatgtgtgtagccattacagttagtgcaagtattgcagttatcttgggtaaacctttattaacagctattttattgattctgttattaccaatagagttggctcctgtcattttagtaagtgcgtatttatctgcctgtttgacaaaagtgagctatagttttagacaaaagaataattagggaggtatttttatgaacgaaaaaaacgatgcagtaactggtgcttctttgatagagaatcaagaagaaaaagtaaaaagcccatggccgggtcctaaaggtatgattcctgtaacaagtgggcgtgctgacgatgctaatgtacataatcgtgcctacttagacaatatcttggtggagatgcgtttgcttgattcagttgagccagacttaacaactgagatttttggtaaaaaatatgcctcacctttaactctggctgcagtctctcatttgaacagggttttaccagataagacgcgtaagccaatgcaagaaaaggcacgtgcggctaagaataccaatactttaaattggattggcatggagtcaaacgaagaatatgccgaaattgtcaaagagggcggcgatacagttagaattgtgaagccttacgcagaccatgataaaattatgggcgaactaaaacaagcagaagaattaggtgccgtagctgttggaatggatattgatcatgtgcctggtgataatggtaaatatgatgtagtcgatggtattccactaggaccgatttcatttagcgatcttgaaaagtatgttcatgcagttaaactgccgtttgtggctaagggcgtgctatccgtgcgtgatgccgttaaggctagagatgctggtgccaaggcaatagttgtttcacatcaccacggccgcgttccatttggcgtgccgccactaaaagttttgccagcaatcaagcaagcactaaatggcagtggaatgaccatttttgtagatggatcattgatgactggctacgatgcatacaaggctttggccttaggcgcagatgctgtactgattggtcgcgggattctttctgaattgttaaaagacgggcaaaaagcaacagaagataagattaagaaaatgaatgagcagcttgcacaaatgatgttatatactggcgttaaagatactaagtcatttgatcctagtgtgttacattttgattaggatagaaaaatgaaatagtttattttttacagtttactataattaagtggctattagcctataataaaggcgtttaaagctatactgaatagtgttatgcttaactcggacgttgttataaggtaattatttaaaagtaattagttgtatacgaaaacatgcttagctatggtaaaagctaagcatgatgtctcataatattgagccgcttgtagattatactacaagcggttttattttagatgaaaataacaagttttcaaaaagtgagtatctatgttttgctattatggaaatggattgatttagaaaatgatgctattgaaatttcattatgagcggggatgcaaaaccttttttaaaaagcataagaatgagcaaaagataattaagcagttaatcgatcaagcgattactaaggaattggcaactggtatgactaaagtgaagatcgctgcaatgactcggattaagggaaaatcaatttacgagtttcgcctaaatttgaaaaaagcgggttcagcgagagtcgcttttgcagtaaaggatgagcaagtactagttcttttgattacctctaatttacagaaggatagttttagtcatgaattagaaactgttctgaaaggaagtcattatgcgtttaattccaattaagcaggcagagactttgctcaaaaaaatgtgtagtaataaaagtaaatatgtagaaattaaattattaacggcaaaaaaggatcgttcaattagtgtgaaaaatgatggtaaaaagctaattttaactgaagatggctatttgaactttacgcaggaatatgaattgactgatccagctgttggccgtcatgcagttttagcggcttttaaaaaggaatttccgcgtagtaatcgtgcatatctgattgctaaatagtatactttaactataagaaaaactatcagtgttgattagaaaggaagtctttttatcaatgaaatatgcagaaaaatctcccgcattatgggatgccattcatcatgaagaacagcgccaacaagacaccatcgaattaattgcctctgaaaatattgtttctgatgcagttcgtgaagcacaaggttctgttttaactaacaagtatgctgaaggatatcctggtcggcgttattacggcggttgtcaatatattgatcaagttgagcaactggctattgattatacaaaaaaattgtttaacgcaaagtttgctaatgtgcagccacactctggatcacaggctaacatggcagtttatcaagcacttttgaagccaggtgatgtcattttaggtatgggcatggatgctggcggtcacttgactcatggatccaaggttaacttcagtggtaaggaatataagtcttacagttacggcctaaatgttgagactgaagaactagattttgatgccattcgtgaaattgctcttaaggttaaacctaagttaattgtagccggtgcttctgcgtacagccgcatcattgattggcaaaagttccgtgaaattgcagatgaagttggggcatacttaatggttgatatggctcatattgctggcttagtagcaaccggtcaacatccaagtcctgttccagtagctgatgtagtaactacaactacacataagaccttgcgtggccctcgtggtgggatgattttgtccaacaatttagaaattggtaagaaaatcaattccgctttgttcccaggcattcaaggtgggccacttgagcatgtcatcgcaggtaaagcgcaagcattttatgaggacttgcaaccacaatttacagattatattaagcaagtcattaaaaatgctaaggcaatggcagaaacttttgctgaatcggacaatattcgtgtcgtatctggtggtactgataaccatttgatgattatcgatattactaagactggtattaccggtaaagatgctcaaaatttactcgactctgttcacatcactaccaacaaagaatcaattccaggcgatcaacgttcaccatttgttactagtgggttgcggattggtacgccagtaattactagtcgtggctttgatgaagcagatgctaagaagactgcggaaatgattattgaaattttatctgatccagaaaatcccgcaacgattgcccacgttaaagaagaagttcaggcattaactaaaaaacatccaattgaataatttgtgtagcagaatttagccgtcctagttctcagctggggcggcttttgttataataaaaaattaaaaataatggagttaagagtgaaggaaacgtgattatttggaaaagttaaaaagacataaaataggcttattttcagcgattatgctggccttgaattctttaattggttcgggctggctttttggttcaggttctgcagcacaaattgcaggtccagccgcaattttatcttggattttaggtgcagtaattatcatctcaattgcattgacttatgtagaattaggttcgatgtttcccgaaagtggcgggatgagtcgatacgctcaatatagtcatgggccgttattgggctttgtggctgcttgggctaactggatttcactagtcacattggtaccgatggaagccgtagctgccgtgcaatatatgagttcttggccctggagctgggctaactggactaaaaattttattaaaaacggcagtattacttttgctggcttaggtgtggttattatttttatgctgatttttacaatgatcaattttgggtcagttaaaatcatgacccattttaccaatttgatttctatttttaagatcttattgcctactttgacgattacagttttaattgcttcaggttttcatggacaaaactttggcagtaatttacatgaatttatgccttatggtagtcggtccatttttgaagcaacttctgtttcaggaattattatgtcttatgatgcctttcagacggtcatcaatatgggtggggaattgaaaaatccgcgtaagaatattgtgcgtggggtattgatctcaatgttaattactgcggcaatctacattatgttgcaagtgacgtttattggtgcagttgagccaggcatgttagctaaagtaggctggcatgggatcaactttacctcaccatttgcggacattgctattattttaggcattaattggctagtgattttgctctacctagatgcatttgtttcaccatttgggacaggggtagcatttgtagctacggcctcaagagccctagcggcaatgacacacacacgtcatttgccaaaatggttaggtagattgaatcaaaaatacttaataccacgttatgcgatgattgctgactttgttttggcggttattttagtaagcttatttagaaactggaatttactagcaacagtaatcacggcctcaactttgattgcatatttgactggtccagttacggtaatgactctaagaaagaaaagaccagatcttgatcgtccatttaatcctggttatatgaagtggctagctccagttacctttatactaactagtttggcaatttactggtcaatgtggccaacgactattcaggtgataattgttattgccttgggtttgccgatttatttttattatgaaattcactaccaacattcaaatttaaaagaacaattacatagtagttggtggatgatcggttatttgatttttatgtcacttatgtcctttgtgggcagtagcggttttggtggtcagaactggattaagtatccatttgactttgtagtaattatcattatttctctcgccttctattattggggaattaagacagggttaaagaaaatcgatccttatgctgaaaaaattgcgcaaaataaagaataagtaaaaaaactgttgggatttttagtctcaacagttttttgttcgctattctgcttcatcaagatacttatttagcaccttgaaaacaccgttgtcgttattagtaggtgcaataaatttagcagtctttttaacgatatcttgaccattagccatggcataacttaaaccagcaaatttcaacatttcaaggtcattttcaccatcaccgaaggcaattaattcacttcttggcacgtctaaataagctaaaaattcctttagccctgcggctttatttacaccttcaggaataatatccatgtagctccaaccactagttgtgacgtggattttttctgtactacggctgttgaagccatgttctaattcatgtcgaatcttgctgggatagtccattgtgatcttagtgtattggtcatcagcaggaattttattaaaatcatcaatttcgatgctattaggataaaaataatgatgggaccgcttgtattctggtggtgtactttttaaaaagtaggagtgcttaacgccactaattaaaatgttttgggctgcaccaggatagcgtgcgtgcaaatattcaataaaatttaggatgcatttttttgaaaagcttgttgtacgaataatttttccatcgcgaactaagaccgcaccattgtcggcaacaaagtcaatagaatcgataaattcgctaaagtcatcagccaaacgaccagctgggcggccgctagcaataataaaatgtgccccgtgttgatgcagacgagttaaaatctcgctaaacatttgatgatcgtattgtttttcatcgttaacaaaagtaccgtcaacgtctacagcaacggccttaaagggaagagtagtcatctaattacctcactaaaatttgataccgttaacagtttaccatttcttgcaagtgcttacataaattatttatattatgtttaacaataaatttgaaatttacgaggtagaaaaaatgacaccatggtggaaaaaagcagttgtttatcaaatttatcctaagtcatttcaggacagcaacggtgatggcataggtgacttacaaggaattattgctcgtttagattatttggaaaatctaggagttgatgcaatttggctttcaccggtctatcaatctcccggtgtggataatggctatgatatttcaaattatgaagcgattgatccgcaatatggcacgatggctgatatggatgagttgattcagaaagctaaggagcatcatatccgaattgtaatggatctggtggttaatcatacatctgaccagcatcaatggtttgtggaggcacgaaaaagtaaggataatccttaccgagactattatatttggcgtgatcctgttgatggacatgagcccaatagtttgaagtctgctttttctggttcagcttggaaatttgatgagcaaacaggacaatattatttacacttctttgcggaacaacaacctgatttaaattggaaaaatccagagttgcggcaaaaaatctacgatatgatgaacttttggcttgataaggggatcggtggcttccgaatggatgtgattgaattaattggtaaagatcccgacaaaatgatccgtgaaaatggtccgatgcttcatctatatttgcaagaaatgaacaagaatacatttggtgatcgagatgtgatgacggtgggcgaaacttggaatgcgacaccgaagattgcagaagagtactcagatccagcacgtcatgaattatcaatggttttccaatttgagaatcaagctttagaccagcaggaaggaaaagaaaagtgggatttaaagccgctagacttaggcgaattgaaaaaggttttagtaaagtggcagacagagcttgattttaatcatgcttggaatagtttgttctgggaaaatcatgatattccgcgcgtaatttcacgttggggcaatgataaaaaatatcgggtgcagtgtgctaagatgtttgcgacagttttacatttgatgcacggcacaccatatatttttaacggtgaagaaattggtatgactaattgtccggtaaaaaatattgatgaagtagaagatattgaaagtgtcaatatgtatcatgaacgtctggctgaaggttatgacaaagataaactaattcatgcgatcaatgttaaaggcagggataatgctcgtcgtccaatgcaatggaatgatgagaaaaatgccggctttactaagtcaaagccatggttgacagtaaatcctaactacaaagaaattaatgtgaagaaggccttggctgatcctaattcgattttttatacttaccaagaattgattactttacgtcatgaaaatgagattgtggttaatggtgactttaagttggttcatgatactggtgatgaagttcttgcatattatcgtattttaggtactgaaaagtggttggtggttgctaacctatctggtgaagagcaacagtttacgtcgaccgatcgcattaaagaaaacttgcttagtaattatgctgtgcgtaatgatctgcatgatattacgcttaagccttatgaagcatttgcagtggcaattaaataagctaaaattaaaaagaacttgaattactaacttgaagatgttattctagttatcgttaatcgattaatctatgatctgtgatatgatcatggcaaaggagtaataaattatgaaacaaggtattcatccagaatttcaagaagtagttttcatggactcagcaactggtgctaagttcttagctggctcaactttgaagccatcagaaactattgactacgaaggcgaaacttacccattagtacgtgttgaagtttcatcagattcacacccattctacactggcaagcaaaagtttgctcaagcagatggtcgaatcgaaaagttcaacaagaagtacggtttgaagaagtaaaccttttatctggtggaagcagtcccattggggctgcttttttcgttagagattatttggcagaatgcatgaaagacagtataatgttttctgtataaaaatgtttttatgggagtaaatattcaatgaaaatgcaaatggcggaaattgccaaggctttaaatactacttgtgaaggtgacaatcaaactgttattacttctgttgcctttgactccagaaagatcacagatggtggattatttgtaccacttgaaggtgaacgtgatgggcacgaattcatagctagtgctattaataatggtgcttctgctactttatggaaaaaggggcatccgaacaagtcagaagatattgcggttattgaagttgatgatccacttgctgctatgcaagagcttgctcgctattatttgcgtaaggttaatccaaccgtagtgggaattactggttcaaatggtaagactactaccaaggatatgattgctgctgttttgtctaaacgctttaatgtacataaaactcaggccaactttaacaatgagattggtgtgccaatgaccattcttgagatgaagccaaatactgaaattttggtgcttgaaatgggaatggacagaccaggtcaattgcatcatttaagtgaattaacccatccagatgtggccgtaattacaatgattggtgaagctcatattgaattctttggcagccgcgacaagattgcagatgctaagatggaaattactgactttttgcgtgaagatggcgaatttatcttcaatggggatgaaccattattgcaagaacgtgctgagaaattggatcaagctaaagcaacttttggttttagagatgaagatacagttcatgcaactggctttaagagttatatgcatcatgctacctttacagttaatgattcagagcaaaaattctcaatcccaatgattggtaaacacaatgtttctaacgcaatggccgcaattagtgttggtcgtcattttggtgaaagtgatgaggaaattgcctcatcattgtctaactttaccccaacggctaatcggatggagtgggaaaaaggcgatgctggcgaaagcatcatgagtgatatctataactcaaatccaactgctgttagagctgtattgactagttttggccaagttgaagtaaaagatggtggtcgtagaattgctgttttaggtgatatgcttgaattaggtaaaaagtcgccggaattgcatgctggtcttgcagatacaatggatccccagattattaacgaagtttacttatatggctctgaaatgaagaatttatatgatgctttacaaggcaaatatgagccagaacatttgcattattatacacaagaacaaacagatcgaatgattgatgatctgaagaacgatattaagtcggatgacattgtagtattgaaaggttcgcatggaatgcacctagaaaatgtcttagcccgactgagataggagaaaaatttttttgaaattttcagaattaggattaaatgatgcgcttcttaaagcgattaaacgttcaggctttgaagaagcaactccaatccaagaacaaactattccccttgctttgcaaggcaaagatgtaattggtcaggcccagactggtaccggtaagacagctgcgtttggcttgccaattttacagatgatcgacaaaaaagaaaaagcaattcaagcggttattattgaaccaacgcgtgaacttgctattcagacgcaagaagaattattccgtttaggtcgtgacgaacatgctcatgttcaagtggtctatggtggagctgatatcggtcgtcaaattcgctcattgaaacaccatgtaccatcaattttagttggtacgccagggcgtttgcttgaccacttgaaacgcaaaactattaatttagatcaagttaaggctgtcgttctagatgaagcagatgaaatgctcgatatgggttttattcaagatatcgaaagtattttgaaatatgctaagaaccgacaacagacattactctttagtgctacaatgcctaagccaattttgcggataggcgaaaaatttatggatcacccagaaattgtccgcattaaagctaaggaattaactgctgatttgattgaacaatattttgttcgtgctaaagagtctgaaaaatttgatattatgtgtcgactaattgacgtgcagggtccagatttggctttagtctttggtcgcaccaaacgtcgcgtagatgaacttacgcgcggtttgcaagcgcgtggctacaatgcggcggaaattcacggtgatctatcgcaagcgcgtagaatgtcagttttgaaaagatttcgtgaaggtaagctagatattctggttgctactgatgtagctgcccgcggacttgatatttcaggcgtaacccacgtttataattatgatattccccaagatccggattcatatgttcaccgtattggtagaactggtcgtgcggggcaaaatggaatctctgttacttttgttacgccaaacgagattggctatatgagaaccattgagcaattgactaaaaagaagatgtcgccgcttcgtccgccaacagatgatcaggcattacatggtcaattaaagcaagcaaaaattgaaattgaagatttgatgaacggtgatttgggtaaatatacccaaggggcaagtgagctgctggataactattcagctctcgacttagttgcagcctttttaaagaacttggctaaagatgaggttaaagtcaagattaccccagaaaagccgttaccatacaagggtgatggtcgccgccgtcgtggtaaaggtcatggccgtagcaataataatcatggacgcgataaccaccgccgtcgtagtaacaataattcataccgccaaaatggaaaccgcggtaagcgtggtcgtggcaacggacatgaatttgtaatcaagaataagaaagattaggattttatcttaaaaagggaagttgtaatttttacagcttcttttttgtattataatgatgtcattgtgtgaggtgaaaataatgattaaaggagtaggaattgactcgattgaagttgaacgagttaagaagatcgtggacaagggggatgcttttgccaaaaaagtattaactcccaaagaatttgatcaatatcaaaaaatggcaggcaaacgtaaagttgaatacctaggcggacgcttttcattaaaggaatctttttctaaagcaatgagaacgggtctgggaaagtatattggttttcaagatgtcgaaactttatgggatgatttaggtcatcccgttatgacttcaactaagtttgatggaaatattttcccaagtatcacacatgataatcatgaaattattacatttgtagttttggaggaaaaataaaaatatggttccaggctatcaccgtccagccgttgtaaaggtaaatttgggcgcaattagaagaaatataaaaaacgaaatgaaacatcttgcaacagggcaaaagatgttagctgtagttaaggccaatgcttatggtcatggtgcagttgaggtggctaaaattgcgattgaggaaggtgcagcaggcctttgtgtagctattttagatgaggccttgcaattgcgtcatgctgacattgttaagccaattttagttttgggagtagtttctccagaatacgctccaattgcggccgcaaacaatgtttcattaacgattcctaaccttgaatggctaaaggaagcagaaaagtaccttgaaaaagagcagttacagttgaaagttcatattggagtagattcaggcatgggtcggatcggctttaacgaagatgaggattttattgctgctaataaattcttacaaaataacgataatttctacgtagagggtatgttcgcacactttgcttccgcagacagtgctgatgatacttactttaagcatcaggtagaaaaatttgctcatatgagaagtttgttgacagttaagcctaagtggattcacgtagacaataccgctgccagcatctttaacaaggatgtgcctagtgattgtgttcgttttggaattggcatttatggtttgaacccatcctctaatcctgatagtcctgacttgaagtcatcaatttcgcttgaaccagcattatcatttgagagtgaactaactcatgtaaaaactattcatgaaggtgacggagtaggatatggttctacctttgtagctgatcaagatacaattattggaactgtgcctgttggctatgctgatggctttattagaaagtttcaaggctttaaagttaaagttggagacgaatactgtccaattgtcggccgaatttgtatggatcaatttatggtcaaaatgccaaagaaaatgccgttaggaactaaggtagtcatcatttccaatgatccaacagcgccaaataatattaaggccgccgcagattatgttgatactattcactatgaagtagcatgtttgttaaacgatcgtttacctcgtgtttactatgaaaaataagttaggcaataaaaaagtgtctgggaaaaaactagcttccagatgaataaaaacgatcaagatttccttttttaagaatcttgatcgtttttttgttctctttaaaatttttaacaataaaaatcggcccttcagccaccttctttgacaatatttgttcaaattcatcatcataaaggcaattccgatatcggtttcgaccttctctttacctcgcaggtgcgttctgcgcatgccaaatacgttcttcaaatgtccgaaaactggctctacatcatattttctcatgccatagatgtgtctgccttcttcgctttggagaacttcttttgctttttcttttaaatattgccagttaggattatagcgaacttggcgctggcggccgctagctgttttagccaattgttccaattctggcgttagctggaactcgtctgcctcataaaccttaaaatcacggacctgaccagtagaacgatccttgcgctggctgtaatatttgaaattgaatctgacgccatgatgatcaatgtaataatcatctttttcattgtagtaccagttgattagcttagttggatcattcttatactttttggtctgttctttttcatacatagtgtagggaataaagtacttcttgtctggatatttttcctccagcatcgaataattgtattcactgccatagccagcatcggcgacgattttgtcaaacttgtccaacacggtcatttgatccaaaaccggctccaaagttttgaaatctgtcggattaggaaagatggcataatcaactacatattgatcggtcgtgactgcttgaatattgtagccaggctttaattgaccatttttcatgtggtcttccttcatatgcataaaggtggcgtcatgatctgttttggaataactgttgcgtccggcaaagatctcttcggcttcttcatatttttgcattcttggcacataatcttttcttagccggtgcagaatcttttttagtccacgtcgcttggcttttcgaggtgaaccgccaggaatggctttgttttcctgctcaatctctttagtcagcttgttaatttctgcttcagtttcttgagctaattcctttagcccctgactagtttgaactttttctttttccatttctttgactacttctttagtaatcaattcatcataaagttcaactgcctggcctttcagcttttcatgatacttttcaaccgctttgcgccagacaaatgtatagcggttagcatcagcttcaatcttagtaccatcgataaaagcagcaccttcattgattaagccttcatcttctaacaggttagtgaagtagataaagctctttttaatcagttcattggcatggctgcttgatctaaaattattgatagtatgatatgaaatcttttgctggtcagccaagatcatcattggcagattttcttccagcatcaactcaatctttctgccagaaaaaactcttctggagtaagcaaaaagcagtattttgagcatcatggctggatgataggctgggcggcccgttttagcagtcttgcctactaaaacatcttctggaattgaatctacaaaccagctgatgacattagccaaatgattggccggaatggcaaaatctagattaagtgttaaagcagtttgacctgtgatataattcttgtacatgttagtttccaccttttttattttgtgatgatttaataatatcaaggctggagctaaaagtatacaaaaagagcgttgaaacaaaaattcaacgttcttttttcatgatctgagacttagttttttcccagacactttttggtagatcagttttttaatccttaacagggtgttcaataaagacacctggattttcatcactcataatagtcatgccggcttgcaaatcttcgatttcagaaactacgaaaccttttctttgtaacttatcaacaatcgttctcatggtaatatctgagacaccagcggggagagtaaagagtgttcttctaacaaaattaccttcgagttcgccagcagctgcatcaagtgtcattacactagacatattagtgtgcttagacacaatcttggacatcttgatcaagttaccacgtgtattgtcagataaaacggtcaaaacgtatgaaccatttttaacatcccacgcatctgacaacatatcaagcattcttgagtgagtaagaataccataaaaatgattatcttcatcaaggacagcaatataaggcaagtccttaatgttgaaaaataccttgaagaatggtgaattgaccttaattgtcttagtggcattcttaagtaagtaagttactggtagattcatatcgccaccttgtgacttatgacggtagatatgcatcttataaatgttaccacggaaaatagtaccagtatcgtcaacgattggcacacatctgtagcctgaatcttctaaaacttttaaagcttctgctaatgtggctttttcattaactgttgttaaataatcttttttaataactaaagatttaataagcatgagttcgcctccgaaagtgagaaatgtttcaagtaattatagcatagttgatgagttaattaaatattaattaaagttcatctgaagtaacaactatattttaacaatagttagacaaataaaaaagcatctccgaaaaaagagatgcttttaagtgaaacaagttttagattattgacgaaccttaacgccagtttccttaaatgccttgtccataaccttcttcaattgatctgcagaagcagtcatcaattcttgttccttgtcacttaatggcatttcaatgatttgttcaagacccttacggccaacaactgcaggagtaccaatgtgaatgtcatgtaagccatattgaccgtccataggaactgaaagtggaagtacacggtgttcatcgttcaagatagccttagcgatcattgctgaagcagtaccgattccgtagaaagtagcacccttcttgttaattatttcgtaagccatgttagcaacttccttgtggatgtcttcaagcttagattcatccataccgtgagccttaacccagtcactaacctttacgccaccaacattgttgtagctccatgctgggaattcagtatcaccgtgttcaccaagcatgtaagcattaactgaacgtgggtcaacatgttccatttcaccgataaccttttgaagacgaccagtatcaagtgaagtacctgaaccgataacacgatccttagggaaacctgacattttccaagttgcgtgggttaaaatatcaactgggttagcaacaactaagaaaataccttcaaagcctgattcaacaactggttcaacgattgatgataaaatcttcaagttcttgttaacaaggtcaagacgagtttcgcctggcttttgtggagcaccagcagtgataactactaagtctgcatccttacagtcagggtagtcagctgcatagatattctttggtgaagtccaaggggtagcatcagctaagtcaattgcgtcaccttcaacgtgttccttagcgatatcaataatacccaattcttcggcgataccttgttgtaccattgagaatgcgaaggttgaacctacagcaccatcaccaacaagaataactttacgaggtctttcatctcttggcataaataaaaatctccttttttattagtgatatttttaacaaaatgaattataccatgatagcaagcattaataaaattattatttcctaattgtgctattatatgtaagattgtgtgcatagtgaggagtaaaaataatgaagataattgcaggtttaggtaatccaggacaaaaatatgataaaacaaagcataatactggtttcatgacaatggatcattatttgaatgaaaagggtttgtcactggataaagataaatttgaaggtcattggactaagcaaaaaataaatggtgaagatgtaattttgcttgagccgcaaacctttatgaatgaatcaggtcgttcagttagtcaagtggctaacttctttaaggttgatccagcagatgtgctaattattcaagatgatatggatatgccaattggtaaaattagaattagagctaatggcaaatctggtggacataatggaattaaaagcatcattcgagatttagggacggaaaagtttaatcgtttgaagattggtattcgtcatccgaaaaatgcaacggttgtttcatgggttttgacaccatttaatgatgaacaacaaaaattgatggatgatgcatttgcgataagtgtagatattattgacgactttatcagcggacatggtagtcaatatttaatgaataaatataattaaaatgcgtttaacagagattttagataaagatcaagatttaaataattttatttcaaaaacaaaacaagtaaaaaattcactaatcactggcgctaatgccggtgcttttagtctattgctaaaacagataacaactaaattagcagctccacttattttaattgaagaaaacgaaagtaaagcacaaaacttatatggtgaactcagtgccattatggcagatgaaactgtgcaaatttttccagtagatgctacaattgcaacgcaaacggcagttagttcgcctgatgaactgagcagccgaattcaggcacttaattttttgttaagtggtaaggcaggaatagtggtaacaacgccgcaggggctgcaatacaaactgaccaatccaactgattttgcgcaggcaaagcggagttttgagccaggtcaagaatatgaactaaaagaactcaatgaatggttgcttgcttcagggtatcagcgtgattctttggtagcacggccaggcgaattcgccatccgtggtgatattttagatgtttatccactagatcgagaaaatcccgtgcgaatcgaattctttggtgacgaaatagatacaattaaggaattcgatttagctagtcaacggagtcaaaaagagttagacaaagtagaagttgcagcagctcaagatcgagtttttactaaggatgcaattgcggcagcggctaagaaaattgaacaagatatggccagtgcaccagctcccgctaaagctgtcaaggaccactttgcggcagttcttgatgaattaaacgatggcggtttacctaaaaactatgctttcttaattgactatttgcttgaaatttctagtagtttactcgaatatttgcctaaaaatgggcagattttatttgacgatttgcctttaattaatcaagcggttgaaacagttgataagcaaaacgctgcttttattaatgatgaactaaaaactggtgcaatgttgccagggcaaagcttgcggtcagattatacaaagattctgagcaaagataagcaccatcgtatttatttctcattgtttcaacgaagcatgggacgactgcgcttaggccagatgctcaattggtcaacacgtgagccagaacaattctttagtcaaatgccgctgattaagtcagaattagaatcttatcaaaaggcggggcaaaccgtcattttacaggctgataatgaaaaaagagcacagcaaattgatcaaacaatggttgattttggcttaaatttaccaattgttggtgcagacgaaattgttgaacaacggacacaaattgtagttgatggctttgttagtggctttagtttaccaacagttaaattggtatatctaacggagcgtgaactatttaataagcgcccacaacgtaaaaaaagaattaagacactggagaatgcccagcgtttgcgcaattatactgaactgaagccaggggattatgttgttcatgttaaccacgggattggtcggtttgaaggaatcaagactttagaaaataatggtaccaagcgtgactatattacgattacctaccagcatggtgatcagctttttgtaccagcagatcaattaagcttagtacaaaaatacgttggttcagaaggtaagacaccacatattaataagctaggtggtagtgagtgggctaaaaccaagcgtaaggttcaatctaaagttgaagatattgcggatgatttgattgaactttatgccaaacgtgaatcagaaaaaggctttgctttttcacctgatgatgatctacaaaaacaatttgaagatgcctttccttatccagaaacacctgatcaattgcgatcggttaaagaaattaagcaagatatggaaagctcgaagccaatggaccgtcttttagtaggggatgttggttttggaaaaactgaggtagccttacgagcagcttttaaggcaattcaggataataaacaagtagcctttttagtacccaccactattttggcgcaacaacactatgagacgattcaagatcgcttcaaagatttcccagtcaatactgctatgctatctcgttttcaaacgccagttgaatcaaaggaaattattgaaggactaaaaaatggcaagatagatttggttgttgggactcaccgtattttgtctcaagatgtaaaattcaagaatctaggattgttaattgttgacgaggagcagcggtttggcgttaagcacaaggaaaagttaaagcagttgaaggcaaatattgatgttttgacattaacagctacgccaataccgcgaacgcttcatatgtcaatggtaggtgtgcgtgatctctcagtaatggaaacgccacctcaaaacagataccctattcaaacttatgtgatggaacaaattcctagtgtagtaagggatgcatgcttgcgtgaaatgcaacgtgatggacaggtcttttatttacataatcggattagtgatatcgatgaaactgtcgaaaaactgcaggaattgatgccacaggcgcgaattgcagctgcccatggtcgaatgagtcagaatcagttggaagatattctttatcgcttcctgaatcgcgagtttgatatcttggttacgactacgattattgaaacaggaattgatatgcccaatgtcaatacaatgatcattgaagatgctgaccactatggtctaagtcagttgtatcaattgcggggtagaattggccgtagtgctcgtttggcttatgcttacttcttgtataagccaaataaagttttaactgaggttggtgaaaaacggcttgatgcgatccgtgacttcactgaactgggttctggtttcaaaatagcaatgcgtgacttatcaattcgtggtgctggaaatatgctgggtgcacaacagcacggctttattgatagcgttggttatgatttgtactcacaaatgctggctgatgcaattcaagaccgtaaggggaagacaacagtcaaaaagtcaaacgcagaaatcgaccttggacttgaggcttatattccagattcgtatatcggtgatcaagaagaaaaaattgaattttacaaaaagattaaagccgtctcaagtcaggaagaattaggtaaaattgaagatgaattaatcgatcgttttggtgactatccaacggccgtcgagaatttattagctgttgccggtctaaaggttgatgctgacatggctcaagtgctcaatgtggttaaaactgacgataagattaaagtggaatttacgaatgcagcttcacgcgaacttgagggacctaatatttttaaggcattggagcatgtaagcttaaaggctcgcattagtatgaatcaagaaaaaagaatggttgtcttgctattgttgccggataaaatgaagaatcgtgttttattcaatgaactggcaatctttttacaggcagcaagcgacattgtacaaaggtaactgtaggagaaaaatatgaggattgataaatttttaaaagtttcacgattagttaagagaagaaccgtagctaaagaaatggctgatcaaggtagaatcaaagtcaatggtcgagttgtaaaatcaagctacgatgtaaaaattgatgatattattgaagtaggttacggcgccaaaaccatcaaggctaaggtgttaaatattcgcgagaccacgaaaaaagcagaagcaagtgaactgtacgagctagttgattaatgacttttgattaaatcgttgttatacttgacttagtatagttatttagtaattaggggattaaacaatgaatcatggtccacgtatatataattcgttgagtccagaagagcagagggcgcgtcttagacgtaaacaggctaaattagagaaagaaacacaccgcaagcggttgaacgtaattatggcagtttttgctatcattttcgttgctttaggtgtacagattgcaatcaagatttctcaaactggacgactgaataatcaagtacaagctgaaaaacagactttaactaaagtaaaaaataagagaaatgacttagaaactgaaaagcaggatttgaaggatccaaattatgttgctaagctgattcgttataaattctattattctaaatcaaatgagaagatttataacgtgcatgaaagaaatgatgataactaatggaaaagtatcaagctggtaatcgggtgactggtgtaattaataacattactgacttgggcatctttgttactttacctaatcggcattctggtttggttcatcatagtgactttggcaataattggctacgcgaacgtcgtcgttatcatgctggcgatgaagtgcgcgtggttgtggtgcacatccataaagggagatttaatttatcgatcactcgagtgaatgatccggaattagttgaccatgataatcaattttctaagacaaagccagctgattttgatcaagtcctgaatcaaacaacgcgggatgctaaagaagaaattgaaaagctaaagcaagtattaactgagaattaagagatggtccgaaagggccattttttgttagaaaaataatgaaaattaatgatttttttgaacaacatcagattgacttaaaggataaaagactattagtagccgcaagtgcgggaccggattccatggctttactagatatgctagttaatttgcaaaaacaactaagttttactgtttttgcggcacattttgatcatcaattgcgtgcggatagctcatatgaagtagaagttttgcaaaattattgtgctcaaaagaagatttgcctgtttaatggcaagtgggataaacatgatcagccccaaacgggaattgaggcagcggcgcgagaggcacgatatcattttttgactaatgttgctcatagcgagcgaatgaactatttattaactgcgcatcatggtgatgatttgctagaaaatattttgctcaaatttattcgctcgggaaatcctgaagagatgaatagtttgcaagatatcggctctatgcatggcgttgttttgcttagaccactattagcctatagtaagcaagaattactcgaatatgatcaagagcgtgaaattgactatgtaatagattcaactaatacggaggatgagactgttcgaaatcgactgcgtcatcatgtggtgccattattaaaagaggagaatcctaatttaattagtaatgcactgcgttttagtgaaaaaatgagtcaattgacggatttggcggatgagcagttgaatagtatgagaacggttgagccatttttgggtgcttggcgaattaaaacggacaacttaaatgatttatctacagaagaaaaaaatattttttggcaaaagataatctggcaaaaatatcatcgccgggtaaatgaaaatttgggcaattttgaggtgattgattatcaaggttatagttatttagttgaaaataagccacagaaaattgtgcagccatttagtatcgaactaaatcagcaatttgaattcaacggagcttattatttactaactactgataggcaagctgatttgaaagaaataggaagcttttggctggaaagggatgcacattttactgcgggaagtctagtacctgctagcaaattattgttgaaaaatggtcaacgagttaaggcgaaaaagaaattttcagaaaaggcaattccctttgccttgcgctcttgctgcattacaatttatgctgaaaatgaacctgtttttgtagaaaaatgttatcaaaaacaggactttatcacagatggtaaacattatttcctatacatttattaagaagtcttcaaaataggtgaaaatgttagtggttgcaagctaatttgtgatagaattttaaacgtataacttaaagactttgcggaggttttttatgaagaataaccggaatcggctactttcaaacggccttttctatatagttgtgttccttctgctcctatggggaatcaactgggcactcggcggctctaacaatagtggtagctcagagaatatcagttactcacaatttgttaaagatttgcgtcaaggcaaagttaaaaactttagtgttcaacctgctaatggtgtttacactgtttcaggtagttacaagactgcacaaacaacaaagaatcaatcaaataatagttttgatttctttagtaataattcaagtagaaaagtttcgcgcttctctactaccatgttacagaatgattctaccgtttctaacgtgcaaaacttggcacaaaaaagtaatgctcggatgacaactcaaggagaatcacaatctggcaattggatttcgaccattgtcatgcttgtgccaaccgttttgtttatcgtcatgctttggatgatgatgaaccaaggtggcgctggacgtggtggtggcggcggaataatgaatttcggtcgttcacacgtcaagccagaagatccttctaagaataaggttcgtttctctgacgtagccggtgaagaagaagaaaaacaagaattagtcgaagtagttgaatttttgaaagatccatctaagtacactaagttgggtgcaagaatcccatctggtgttttacttgagggtcctcccggtactggtaagactttgcttgctcgtgctgtagctggtgaagctaacgtgccattttattcaatctcaggttcagacttcgttgaaatgtttgtcggtgttggtgctagtcgtgtacgtgacctgtttaacaatgccaagaaaaatgcaccaagtattatctttatcgatgaaattgatgccattggtcgtcgtcgtggcaatggcaccggcggtggtaatgatgaacgtgaacagactttgaaccaattattggttgaaatggatggttttgaaggcgatgaaggtgttattgtcattgctgctactaaccgttcagacgtcttagacccagctttgcttcgtcctggtcgttttgaccgtaaggtattggtaggtcgtcctgacgttcgtggtcgtgaagctattttaaaggttcacgctaagaacaagccgcttgcacctgatgttgatttgaaggaagttgcccgtcaaactcctggctttgtaggtgcagatttggctaacgtcttgaatgaagccgcattagttgctgctcgtcgtaatggtactgagattactgcatcagatattgatgaagccgaagaccgtgtgattgccggtccagctaagaaggatcgtttgatttctgaaaaagaaagaagacgtgttgctttccacgaagctggtcactcaatctgtggtttggtcttaagcgactcacgtactgtacgtaaagttactatcgtacctcgtggccgtgctggtggttataacatcatgttgcctaaagatgatcaattcattttgactaaaaagcaattatttgaacaaattgttggtttgatgggtggtcgtgcaggtgaagaagcaaccattggtgataagtcaactggtgcttctaacgactttgaacaagctactcaaattgcgcatagcatggtagttaactatggtatgaccgaatccttaggtatggttgagcttgaaaaggaaggcgaaagcaatccttacggctttaagccatatagtgaagcaacttcagctaaaattgatgaagctgtaaagaagattttggatgaagctcatgctaaggcccttgagatcgttaaggacaacaaagaaaagcatagaatcattgccgaagctttgctcaagtatgaaaccttgaatgaaaagcaaattatggccttgtataagactggtaagatgcctgaaaaagacgaagatgaatatccgagtgaatcaaaggcttcaacttatgaagaagctaaggctgctgcagagaagcgcgaagttgaaaaggcagaaaaaaaggattcagatcaagcattagctgatcaagaaaaagataccttggagactccatctgaaaagaatcatgaagttgaagaaaataatcctgagaatcccgaaaaggatcaatcagaaaatgaaacttcaactcaagatactcctgcagatgatgagcataaagacaattaaataaaagtagggcctgtcacaggctctatttttttagaaaagaaggataaaaatgagtgattatttagtaaagtcaattgataagactaaaaacttacgcttgttaaccattaccgctaagggtgtagtgagtgaagcacaaaagcggcatgacttgtggtcagcttcagctgctgtgcttggtcgtactttagtaggatctcttttacttgctggtgcagaattgacagataaggaagaattgacagtccgtttattaggcaatggccctgttggtccaaccatcgtgacagctacctccgatttgaaggtaaagggttatgttaagaatccacatattgctttaccacctaagaaaaatggtcatattgatgtgaaaaaagctgttggacaaggatggtttgaagtaactaaggaccttggcttgaaggaaccatacacaggtcaggtaccaattgtttctggtgaaattgctgaagattttgcttactatttgactaagtcagaacaaattccgtcagctgttggtttgtcagtatttgttaatccaaataattcaatcggtgaagctggtggctttatgttgcaagcacttcctggtgctagtgatgctttgatcgatgaaacgattaagcgaattgatgcattgccagcactctcaacttcatttttggatggaatgacaccagaagacttagcacgtaaaatcttaggaaccgattgtaagattcttgaaaaagatgatgtagcctttaactgtgattgttctaaagaaaagtatgctggtattttggaaactttgaagagcgatcaattgaaagcaatgattaatgaagatcatggtgccgaacttacttgcaatttctgcggtaacaagtatcattattcagaagatgaattgaaagatattttagctaaaaagaacaaagataaagattattaaggcaaataaagccctaaggttttaaccagcggggcttttttgatatcataatagggtaattttgaaaggatgatttggtgaataacagctggaaaattcgcgatatcaccattccaaaccgagttgttgttgcgccgatggcgggagtttcaaactctgcattccgcgttgtctgtaaggaattcggagcggggctggttgtctgcgaaatgatttctgatcatgggatcatttatggaaataaaaagacattaagtatgatggatgttgatccgcgtgaacacccaatgagcattcaaatctttggcggaagcgaggaaactttgcttcaagctgctcaatatattgatcaacataccgatgcggatattattgatattaatatgggttgtcctgtacctaaagtaacaaagactgatgcaggttcgaagtggctacttgattcaaacaagatttatcagatggttcacgcagtagtgcagaacgttaaaaagccggtttctgttaaaatgagaacaggctgggataaaaagcatatttttgctgtaaaaaatgctttagctgctcaagaagcaggcgcaagcatgattgcgatgcatggtagaacacgtaaacaaatgtatcaaggtgaagctgactgggaagtattacatgatgttgcccaggtgctagatgtgccttttgtggctaatggtgatattagaacacccgaattagctaaaaaagcattggatgagatcggttgtactgcagtaatggttggtcgcgctgctttaggtaacccttggattttgaaagatatggtacactatctggaaactggtgaaaaattgaagccgcaaactgttcgtgagaaggttgaaacggctaaacatcagcttcacgcacttgttaaaattcacggtgaaaagcgtgctgtaccagaatttcgtcagcaagccgcgtattatttaaagggaattccccgttcagcccgtactcgtgctaaaataaatgaggtctggacgcgtcaagaagtatatgatttgcttgataattttgttgacgagtatgaaaaaagagaagaagctcgtgctgcacgacgcgcgacaatgaacaaataaatggaggaaaagtaaattggcaaagaatgaaatgaatgaccaattaatagttcgtcgccagaagatggaagaattacgtgaaaacggaattgaaccatttggtcaaagaaaatttgatcgtcaagatttggcaagtactttagaagaaaagtatggcaacgaagataaagaagaattaaacgctgatatgcctaagaccaagattgcaggtcgtatgcttgcaaagcgtggtaagggtaaggttggttttgctgatctttacgaccgtactggtaagattcaaatctatgtacgtaaggatattgttggcgaagataactacaagatctttaagaaatctgatattggtgatttcttaggtattgagggtgaagttatgaagactgatactggagagcttactattagagcccttcacgtaactttcttatcaaaggctcttcgtccattaccagataagtaccatggtttaaaggacgttgaggcaatttatcgtcaacgttaccttgatttgattaccaaccatgatagttacatgcgttttgttcaccgtacccaaatcattcaagctattcgtgactacttaaatagtcaaaacttcttggaggttgaaactccagtacttcacaacattcctggtggtgctgaagctcgtccatttattactcaccacaacgctttggatattaacctttacatgagaattgctttggaacttccacttaagcgtttgattgttggtgatatggaacgtgtttacgaaatcggccgtgtattcagaaacgaaggtttggacactcaccacaacccagaatttactgaacttgaaagttacgcagcatactgggactaccatgatgttatggatgaagctgaaggtattatccgtgctgcagctaaggttgtttcagatgacggtaagatcacttaccaaggtactgacattgacttaggcaagccattccgtcgcgttcacatggttgacttgatcaaggaaaagactggcgttgacttctggaagccaatgactcttgaagaagcaactaagattgcggaagaccacgacatccacgttgaaaagttctggaaagttggtcacattattaacgccttctttgaaaagtactgtgaagaaactattgttgacccaaccttcgtttacggtcacccagtagaaatctcaccacttgctaagaagaatgctgacgatccaagatttactgatcgtttcgaaatttacatcatgggtgaagaatacggtaacgccttctcagaattgaacgatcctgacgaccaacgtgaacgtttcgaagctcaaatggaagaacgtgaagcaggtaacgacgaagctgacatgatcgatgaagattaccttcgtgctatggaatacggtatgccacctacaggtggtttgggtatcggtattgaccgtttggtaatgcttttgactgatgctccagctattcgtgatgttcttttgttcccaacaatgcgtccagaacgtgttgaaagcgtagaagctgaagttaaggctgatatggaaaagaagaataaagaaaataagtaatcttataaattaaaaaactcttatctatgttttaagcatggataagagtttgtgtttatatattttttaattgagaatcattttttcatcagagtattttttaggatcatttaaatcccattgctgatatctaacttcttgacacttaaagcctaattttttgtaaagctttttggccttagtattttctgcaaatacatcaagactaactggtcgactcatgtatctcaaagctgtcgttgctaaagcatacccgatacctttattttgatgaattggatctacataaatgtaatccagttcttggggatgaactgcaacgaagcccaatatgctgtcagcatcataagctacataaattttgcaggagaaaaaatcatccttatatggagctgtctctaaaggtatgaagtatttttccgcaccaccaattgttagctcttctttacgactaacgtcgtgaatgcgacatacttcagcataatcgtttggttgatattctctgatattaaattttggcatgtttttctcgcttcctaatattaagattttgatttagaaagcaatagtacgtaatctcatgtgaaatctcctttaattaaattgaagatattatagcaatttttttaattcggtacaataactaaaattaacttagttaaaaacagataagtaatattttttcaaaaagtatttgcaaagagaataatctttgctataataatttttgtatcgcggaagtagttcagtggtagaacatcaccttgccatggtgggggtcgcgggttcgaatcccgtcttccgctccaagatgaagagctcacgaatgtgagctttttttgtgcctaaaataaatttatcttttttgataaaaaggtcttgcaaagaaaaatgtatttgctataataatatctgttgtcgcggaagtagttcagtggtagaacatcaccttgccatggtgggggtcgcgggttcgaatcccgtcttccgctccaagatgaagagctcacgaatgtgagcttttttgtgcctaaaataaatttatcttttttgataaaaaggtcttgcaaagaaaaatgtatttgctataataatatctgttgttgcggaagtagttcagtggtagaacatcaccttgccatggtgggggtcgcgggttcgaatcccgtcttccgctccaagatagaaggctcaccaagtggtgagtctttttttacgggaaatagctcagtttggtagagcgctacgttcgggacgtagaggtcgccggttcaagtccgattttcccgatatacaagctatccgtttgggtagcttttttctttttgttataatatcttttaaaacttaaagggagattaaaaatgacggcaactactgaagaaaaatacaaattattagtggagcaagctagagctttgattgagggagaagatgattggattgctaatacagctaatttatctgctcttttgtttaattcgttaaatgatgtgaattttgcaggtgtttatcgctatgaaaatgatgaactgatattaggtccatttcaggggatgccagcatgtgttcatattcaaatgggaaaaggtgtttgtggtacggctgcacaagcaaaaacaacgcagattgttaaggatgtacatgaatttgctggtcacattgcttgtgatagtgcttcaaattcggaaatcgttgtcccaatttttaatcagggaaaactttggggcgtctttgattttgattcgaccaagctactaagcgtataattttttacggtaagttgaataaataattaaaaaagcccaagtcctttgaatttggacttgagctcaaacaaaaagaccagtagtctgatgttaagaacaaaaaacacattagaagctggtcttttatgaattcaattgtaactgaaatcgcaaatattataaagtctgaagataattatattaagcgtgaaagaaaaataatctgtttcttcttaaacctgattaaggaaatcatggccttggctttagctaaagttgatgatgaaatgattaccaaggttaaagcacagggctatcagattgataagaagaatgagcgctcaatcaatatggcttttggcgaagttaggtatgtcagaagaagatatgtctgcccaggcaaacaagcaaggtatcccttggatgaattaatgggctttgacaaatacaagcgctacagtattttagcagtcaaaaacatcttagaagtaagcagcgttgccacttatcgcaatactgctctagcagtcaattgcctgtctggctttaatattagccatatgcaggtgggcaatttggtaaaaatggccgggaaaaatattaaagcgggccaagaagcagattcaagatatgatgccgcaggcactaagaaaaaggtcccagttttgtatcttgaaggcgatggcgtggtgatcaaaggcactaaaagccggttggaatttcatcgctatcaggtctgtgaaggcattgtcaatataagcaagaaacgcagaaagcgaatcaatgccaaggaatttgtttctttaagccgacttgatgcgctgaacgaagccaaggagtacctggccaatacttatgatctttctgatactgtaattcttagcaacgccgatggcggtgctggatatgccaaaacagacttcgatgacattgtagggctatgcaagcgtcatgagcatttcttggatgtctttcacctaaataagaaaatcaaagaaaggctatattttgcgcctgacctgcaaggcaagctgatttctgctttggaatacaaatacagctatgacaaagttaaaactatcctaaccactgcagaaagccgactaattgatgaattgaataccgagctcaatcatgattatctggggcgcctaaggaattatattgatcgtcattgggacgatattaagccgtttaagaaacgaaaactgactgtgactaaagccattggctgctgcgagagcaaccaccgcaagtatacctaccgtgttaaggggcaaggcaagaaatggtcaaaatctggagcagaaggcatgcttaggatcttaagctgcatcaagaatcgagagctggaattttggcttagcagcgagtttgaagattcagaaataactgtattgactgaacaggaattaaaagcagcggcccgtgacagcttaaagaagcgtcatgaagttcatttaggcatccagcatggcgcattaaccgcacaggtagctggcaatagttatttaagcaagctaagcagaaatttaagtcatataaatatttaagaaattaaggttagactaatggtttaaaggctaccgcaaaaacattgacacttacaccaagctagctaattttgacgaaattgataaaaagtatttaactgaaatagcgaaagcaatttttgcgtaattattagaattggacataatgaagttgaagataagtcaaattgttttacttactgacaaaagaaaagtaaaataccataacgtattttaaagggtggtgtttgtatggaaaattcatatagtaagagcgttaatcaagtattgaaaattgcacgtgaacaagcacaaaattttcatcatcgcttgattggcacagaacatgttttattggctctagtaattgaaactgacggtgaagcaggaaaaatcttgcgttcatggggattaacaccaactgcagtacgtgaagaaattgaacgttatacaggttatggctctgcccctaaggcaagctacatggaaatgtcaccacgtttgagtttagctttggattatgctagaagacgagctaatgacgatggagttaaggaagttaacactaatcatgttttgctgggaattactgcaagtgagcaggttttatcagcaatgattttgaaaaacttgaatgttgatattcctcgtctgcagcaggatgttgaagacagtttgagtcaagaccaagactttggtgattcagctaattggctgggtgatgataacacgacgactggtcaaaagaagcgcaagagcactactcctaacttagataaggtagcggttaatttaaatcaacgtgtgcgtaatggcgagattgatccggtgattggccgtgaccaagaaattaagcgtgtgattcaaattttgtctcgacggactaagaataatcctgtcttagttggtgaaccaggagttggtaagactgctgttgctgaagcgattgcaactgagattgtcaacaaaaaagtgccacaggatatgcttaagaaacgggtaatggccttaaatttaggtagtttagttgctgggactaagtatcgtggtgagtttgaagacagaatgaagaaaatcctgaacgaagtcaccaaggatggcaatgtcattctctttgttgatgaaatgcatactttaattggtgctggtggtgctgaaggtgcaattgatgcttctaatatcttgaagccttcgcttgctcgtggcgatattcaaatgattggtgcaactacttttaatgaatatcaaaagtacattgaaaaagatcaagctttggcacgtcgttttcaacaagtgcgcttaagtgagccttcaagagatgacactttgacaattatgcgtggcttgaagtcgaaatatgaaaagttccatcatgtgactatttctgatgagagcttgaaggatgcagttgatttgtcaacgcgctatatttcggatcgctttttgccagataaggcgattgacttagtagatgaagctagtgccgcagttaagattcgtaataacattagcaatgatgctgagctagaaaaagttaatgagcaaattaagaaactgattacgcaaaagaatatggctgccgctagtcaaaactttgttaaagctgctcaattgcaggatgagcagaacaacttagaaatgcaacgtgaagcaatggtagagaagttagaagacaaagttagtgctaaagctgtggttgagccagaagatatcgctaaagtagtttccaactggactggcgtccctgttacccagatggaacgcaatgaatcacggcagctagctaacctggaaaagattttacaccaacgtgttattgggcaagataaggctgtttcagcagttgcccgtgctattcgtcgtagtagaagcgggattaaagatgaacgtcgtccgattggttccttcttgttcctaggtccaactggtgttggtaagacagaactagctaagtcagttgcagcagcaatgtttggctcggaagacaatttgattaggctagatatgtctgaatatatggaccaaattgcttcaagcaaattaattggctcggcaccaggctatgtcggttatgaagaaggcggtcaattatctgaaaaggttcgtcgtcatccgtactcggttattttgcttgacgaagtagaaaaagctcatccagatgtctttaacttgcttttgcaggttttagatgaaggatttttgactgactccaaaggtagaaaagtcgactttagaaatacaattataatcatgacttctaatttaggttctcgttcgctctttgataataaggcagtcggcttcaatgcagataatgcagatccagccaaggcgagatcagctaaagttgaacaagcaatcaaacaattcttccgcccagaatttttaaacagaatcgatgaaactattatcttcgatgaactagataagaagcagctgcgcaatattgtaactttgttaacgcacaagctggtagttcgtttgcaaaagaagggtatcgaattgaagctatcacgggcagcactggatcagattgcacaagatggttatgatccagaaaatggtgctcgaccattgagaagagcaattcaaaatgatattgaagacaagattgccgagatgctgattgtaggcgaagttaagtcaggcgacactttgaaaattggtagtcagcatggacatttaaaatttgaagtagttaatccgaaaaaagaaactgtaaaagtcaagtgatattggtgctataccttgacaaaatgctgaaaatatcatataatttttgctgatttaaaaagactgagattcaggattttgctgatctattgtccagcaaaatgataagggacaaaaacgacaattgttgtttttgtcttttttatgcctaaaattgcagttttttgaatttgtaacagaaatgtaatatttgctttcttagacagaaaggatgtttttccttgttaaatggacacgtagtgaactacggtaaacatcgaactagacgtagcttctcccgcattaaggaagtattgaagttacctaacttaactgatgttcaaaccgaatcatataagtggtttcttgataaaggcattaaagaagtctttgatgacattatgccgattagcgatttctcaggtaagctttcattagaatatgttggctataaattgcaaaagccaaagtatacagttgatgaagcccgtaaccatgatgcaacttatgctgcaccaatgcacgttaccttgaaattgactaaccaagaaactggtgaaattaagactcaagatgttttctttggtgatttgccattaatgaccgaatcaggttcatttattgttaacggtgctgaaagagttatcgtttcacaattggtaagatcacctggtgtatattacactgacgattatgacaagaatggtcgtcaaatctttggtactactgttattcctaaccgtggtgcttggcttgaatatgaaaccgacgcaaagaacgtttcatttgttcgtgtagaccgtactcgtaaattgcctcttactgtattgattagagcaatgggtattggctctgacagtgacattattgatatgtttggtcaaagtgatactttgcaattcactttggacaaggatgttcataagaacccagctgactcacgtgtagctgaagccttaaaggatatctatgaaagacttcgtccaggtgaaccaaagactactgattcttcacgttcacttttgtatgcccgtttctttgatccacgtcgttacgatttagcacctgtaggtcgttacaagatcaataagaagctttcacttaagaaccgtttatacggtcaaactttagctgaaactttagctgatccagatactggggaaattgttgctaagaagggtactgtagttacccacgaagtaatggataagttagctccataccttgatcgtgatgactttaagatggtaacttaccaaccttcaaaggaaggcgtattaccagatcctattacagttcaagaaattaaggtttactcaaaggtagaccctgaacgtgaagttaaattaatgtcaaatggtcatattgctgataacgttaagcatttgactccagctgatgttttagcttcaatcaattacttctttgcattgcaagatgaaattggtactactgatgatatcgaccacttgggtaaccgtcgtattcgtcgtgttggtgaacttcttcaaaaccaatttagaattggtttggcacgtatggaacgtgttgttcgtgaaagaatgtcaatccaagatccttcaacagttactccacaacaattgatcaacattcgcccaattgttgcaagtattaaggaattctttggttcatcacaactttcacagtttatggatcaacataacccattaggtgaattgactcataaacgtcgtatgtcagccttagggcctggtggtttgacccgtgaccgtgctggttatgaagttcgtgacgttcactatactcactatggtcgtttgtgtcctatcgaaactccagaaggtcctaacattgggttgatcaactcacttgcttcatatgcgattattaataagtatggttttatcgaaaccccataccgtcgtgtttcttggaaggaccacaaggttactgataagatcgactatttgactgctgacgaagaagataattacattatcgctggtgccaacactccattgaatgatgatggttcatttaaggagaagttgatcttggctcgtcaaaaggaagataacgtcgaagtttctccagataagattgactacatggacgttattcctaagcaagttgtttctgtcgcttcagcatgtattccattccttgaaaacgatgactctaaccgtgctttgatgggtgccaaccagcaacgtcaggctgcaccattaattaatccgcatggttcacttgttggtactggtatggaataccgtgctgcacacgattcaggtgctgctttaatcgctaaggctgctggtgtagttgaatacgttgatgctaatgaaatccgtattagacgtgaagatggtactttggacaaatacacacttgaaaagtaccgtcgttcaaataactctaagtcatacaaccaaactcctaatgttaaattaggtgatcaggttgacaagagtgatgtaattgctaacggtccaactatggatcatggcgaacttgctttaggtcaaaacccattgattgccttcatgacttggaacatgtacaactatgaagatgccatcatgctttctgaacgattagttaaggatgatgtttatacttcaatcagtattgaagattatgaatcagaagctcgtgacactaagttaggtccagaagaaattactagagaacttcctaatattggtgaggatgctttgaaggatcttgatgctgatggtatcgttcgtgttggtgcagaagtccacgatggcgacattttggtaggtaaggtaactcctaagggtgtaactgaattatctgctgaagaaagattacttcacgctattttcggtgaaaaagctcgtgaagttcgtgatacttcacttcgtgtaccacacggtggtggcggtattgttcaagacgttaaggtttatactcgtgaagccggcgatgaactttcaccaggtgttaacacaatggttcgtgtttacatcgctcaaaagagaaagattcaagttggggacaagatgtctggtcgtcacggtaacaagggtactgttgctgcagttgttccagaagaagacatgccatacttaccagatggtactccagtagatatttgtttaaacccaatgggtgttccatcacgtatgaacatcggacagcttcttgaattgcacttaggtgcagctgctcgtcaattgggcattcacgttgcaacaccagtatttgatggtgctgacgaaaatgacgtttgggacacagttcgtcaagcaggtgttgataaagatggtaagaccgttgtttatgatggtcgtaccggtgaaccattccacaaccgtgtatctgtaggtgttatgcactacttgaagttgacccacatggttgacgacaagatccacgcacgttcaattgggccttactcattggttactcaacaaccacttggtggtaaagcacaatttggtggtcagcgttttggtgaaatggaagtttgggcccttgaagcttatggtgctgcttacacattgcaagagattttgacttacaagtcagatgacgttgttggtcgtgtaaaggcatatgaagctattgttaagggtgaaaagattcctaagccaggtgttccagaatcattccgtgttcttgttaaggaacttcaatcattaggtttggatatccgtgttcttgatatgaaccataatgaaattgaacttcgtgatatggatgaagactcaagtgaacacttgaacatcgatactttgtcacggatggcagaagagcaagaaaagaagaagttagccgaagaaactggaaaatcagaagataaagacagtaaagaaaatgcagataagccggtagctcctgcagatgagtctgacgataaagtttctaaatagtaggaggttaaacttttgatcgacgtaaataagtttgaaagtatgcaaattggtcttgcatcacctaacaagatcagaagctggtcatatggtgaagttaaaaagccagagaccatcaactaccgtactttaaagcctgaaaaagatggcttatttgatgagagaatttttggaccaacaaaagattggtcatgtgcttgtggtaagtacaagggcgttagataccgtggtatcgtttgtgaccgttgtggtgttgaagttacttcttcaaaggtaagaagagaacgtatgggtcatattgaattggctgcacctgtaactcacatttggtactttaagggtatcccatcaagaatgggattagttttggacatttctccaagattacttgaagaagttatttactttgctgcatacattgtaattgatccaggtgatactgaccttgaacctaagcaattattaactgaagctgaataccgtgaacaaaaagctaagtacggtaaccgttttgaagctaagatgggtgctgaagctgttcgcgatttgcttaagaaagttgaccttgataaagaagttaaggatttgaagaaagaacttcaaactgccactggtcaaaaacgtacgcgtgcaattagacggttagatatcttggatgccttcaagaattcaggtaacaagcctgaatggatggtaatggatgccgttccagtaattccaccagatcttcgtccaatggttcaacttgaaggtggccgttttgcaacttcagatttgaacgatttgtacagacgtgtaatcaaccgtaacaaccgtttgaagagattgcttgatttgaacgcacctaatattattgttcaaaacgaaaagcgtatgcttcaagaagctgttgatgctttaattgataacggtcgtcgtggtcgtccagttgttggaccaggtaaccgtccattgaagtcactttcacatatgcttaagggtaagcaaggacgtttccgtcaaaacttgcttggtaagcgtgttgactactctggtcgttcagttatcgatgtttcaccaaaattgaaattctatcaatgtggtgtgccacgtccaatggctttggaattgttcaagccatttgtaatgcatgaattagttaaacgtggaattgcatcaaacatcaagaatgctaagcgtaagattgaccgtgaagatgacgatatctgggatgtacttgaagatgtgattaaggaacgtccagttcttttaaaccgtgcacctactcttcaccgtttgagtattcaagcctttgagccaatcttggtaccaggtaagtcaattagacttcacccattagcttgtgaagcctacaatgccgacttcgatggtgaccagatggctattcacgtaccactttctgatgaagctgttgctgaatcaagattgttaatgttggctgctcaccacattttggctcctaaggatggtaagccaattgttactccatcacaggatatcgttttgggtaactactggttaactcaggccgaacgcggtcgtgaaggtgaaggtatgatcttcagctcaccagcagaagctgctgtagcttacgaaaatggcgatattcactaccataccattattggtatgtctgcagatgctatgcctaaaaagccatggcctaagggacatgaacacggcatctttattaccacttatggtaagattgtcttcaatcaattgttcccagatgattacttctatatcaatgaaccaactgaagagaacttgaacaatccgttggatgctaagtacttcttaggtgaaggcgaagagattgataagaagatcgatgaagtaggcgatgatttaatcgctagtccatttaagggaagcttcttgtcagattctattgctactatttacaagtattacaaggttcaaagaacttcagaatacttggatgatttgaagaagttaggctacattagctcaactacttcaggtattactattggtatgactgacgttccagaaatccaagataaggatgaaaaggtagccaaggcacgtaaacaagttgatgttgtttctaagcaatttagacgtggtttgattactgaacaagaacgtcacgaccgagtaattagtatttggaatgcatgtaaggacaagatccaaaacgaaattgcacaaattcacgcacctcgtaatccaatttcaatcatggcagactcaggtgcccgtggtaacatttctaactttactcagttagccggtatgcgtggtttgatggccactcctaacggtggtttgttcgaaattcctgttacttcaaactttaaggaaggtttgtcagtattggaattgttcatgtctactcacggtgctcgtaagggtatgactgatactgcattgaagactgctcagtcaggttacttgactcgtcgtttggttgatgttgctcaggacgttattattcgtgatgacgattgtggtactgatcgtggtattacagttagtgccatcatggaaggtgacgaaatgatcgaaccattatttgaccgtttggttggtcgtttcactgctgagactgttaaagatcctgaaactggcgaaactattgtcggcagagatgtcatgatggatgaaaacatggcacacaagatttgtgatgcaggtgtaactcacgttaagattcgttcaattcttacctgtgatactcctcacggcgtatgtcgcaagtgttacggtatgaaccttgctactggtgaagaagttgaagttggtgaagcagttggtactgttgctgctcaatcaattggtgaaccaggtactcagcttactttgagaactttccacaacggtggtgttgccggtgctgaagatatcactcaaggtttgcctcgtgtgcaagaattgtttgaagcacgtaaccctaagggtcgtgcaaccatttctgaagttgatggtgtaattgattcaattcaagaaaacccagcagaacatactcgtgaaattactgttaagggtaagattgatactagaagctacagtgttccttatacagcttcagttgctgttagcgaaggtgactacgttcatcgtggtgacaagttaactcttggttctgttgatcctaaggaattgattcaagttactgatacattaactactgaaaagtacatcttagctgaagttcaaaaggcttatagaatgcagggtgtagacattgccgacaagcacgttgaagtgttaactcgtcaaatgctgcaaaaggttcgtgtccttgatccaggtgaaactgacatcttgccaggtgaagttatggatattggtcaatttagagaccgcaacaaggaagttattatttctggtggtattccagcaactgctcaaagcgttatcttgggtattactaaggctgctttggaaactaacagtttcttgtcagctgcttcattccaggaaaccacacgtgttcttactgatgcatctattagaggtaagaatgatccacttcttggacttaaggaaaacgttattattggtaaaattattccagctggtactggtatgcctgtataccgcagcatggaacctgaagctgacgttaagaagccagattcagtatactcaattgctgatattgaaaagcaaatgaaagaaaaggataaagctaagcaagactaagctttattgaaaataaataagcatttccaatcttttaagagcgggaatgcttatttttttgtctaaaaaattaattgggttagtactaatcctaggaaaatatatggaataaatggatagcgatggttaataggagttttttcaataagaaaaattgcaattaccaagattgaagcaaatagaaaaactaaattggcaaatgatggggtgaagtagcaagcgataattaagtaaattaataaatcgcctagccccatttttctttgcattatgctatagctaaaaattcctagcaataatgtaaaagagatccagtcgattaatgtaaaagctgcaaattggttgaataaaatcgcaacgctaatggctggaattagtaggagaagatcaaattcttgcttttgataatcagagattgcaacgactaaaagcgaaaaaagcaaaatagcggtaataatgtcctgtgtcttactaaaatcgagtaaacaaaaggcaaagccgccaattaattcaaataaaaataattcaactggaatttgttgataacaataacgacattttccttgaagaaaaagataagataataatggaatttcatccaaaattgataattcaaggtgacagttgttgcactgagaacgtgagtaaataaaatttttatcattccagtgctcgtaaactactgctgcgtgagaagccaagcaacttccaattataaagttagtaaaaataaataagtatttcaaaaaaacacctccactatttattacgcaaaaatagccgatttttctttttttattttgaaaaagtttgctttctgcttaaaaccgagtacaatagtctttgtatgttttgaacagtctattcgtgagtaaaaaagaaactcccggatgtgtgaacaaaatagtattttaggaggaaaaattaatgccaaccattaatcaattggtaagaaaaggccgtcattcaaaggtcactaagtcaaagtcacctgctttgaattacagctacaacagtatgaagaaggaatcagtattcaacccagctccacaaatgcgtggtgttgcaactcgtgttggtactatgactccaaagaagcctaactcagctttacgtaagtacgctcgtgttcgtctttcaaacttgatcgaagttactgcttacattccaggtgaaggccacaacttgcaagaacactcagttgtattaatccgtggtggtcgtgtaaaggaccttcctggtgtacgttatcacatcgttcgtggtgcccttgatactgctggtgttgatggcagaaagcaaagccgttctaagtacggtactaagaaagattaaaggaggagttaaataatgcctagaaaaggtcacgtaactaagagagacgttttagcagatccagtttacaactcaaagcttgttactaagttgatcaaccacttaatggtcgatggtaagagagctaaggcatcttcaatcctttacgatgctttcaacattgttcaagacaagactggtaaggaaccacttgatgtatttgaagaagctatgaacaacgttatgccagttttggaagttagagctcgtcgtatcggtggttcaaactaccaaatcccagttgaagtacgtcctgaaagaagaactactttaggtttaagatggcttgtttcatacgctcgtttacgtaacgaacacactatggatgaacgtttagctaacgaaattatcgatgcttcaaacaacactggttcagcagttaagaagcgtgaagatgttcaccgtatggctgaagctaaccgtgcatttgcacactaccgcttctaatttgttcgttttaatttaaggagagaataatttatggctaacaagcgtgaatttccattagcaaagacacgtaacatcggtattatggcccacatcgatgcgggtaagactactactactgaacgtatcctttactacactggtaagatccacaaaattggtgaaactcacgaaggtgattcacaaatggactggatggatgaagaaaaggaacgtggtatcaccattacttctgcagctactactgcacaatggaaagaccacagaattaacatcatcgacaccccaggacacgttgacttcactatcgaagtagaacgttcacttcgtgttcttgatggtgccgtaactgttcttgatgcccaagctggtgttgaaccacaaactgaaaacgtatggcgtcaagctgaaacttacggtgttcctcgtattgttttcgttaacaagatggataagatcggtgctgacttcgataagtcagttaagtcattgcacgaacgtttaaacgctaatgcccatgctgttcaaatgccaattggttcagctgacacttttgaaggtgttatcgacttaatcaacatggttgccgacatctacgacgaagataagcttggttctaagtgggatactgttccagttcctgacgaatacaaggaagaagctgaagcacgtcgtaacgacttaattgaagccgtagccgatgttgatgacggcatcatggaaaaattccttggcggtgaagaaatttctaacgatgaattaaaggcagctatccgtaaagctactttggacttgaagttcttcccagtttacgctggctcagccttcaagaacaagggtgttcaaatgatgcttgacggtgttattgactacttgccatcaccacttgacgttaagccttacgttgctcacaatcctaagactggtgatgaagttgaacttatggctgacgataagaagccatttgcagctcttgcatttaagattgctactgacccattcgtaggtcgtttgactttcatccgtgtttacaccggttctcttgaatcaggttcatacgtattgaacgcttcaaagaattcacgtgaacgtgtaggtcgtttgcttcaaatgcacgctaactcacgtactgaaattccagaagtattctcaggtgacatcgctggtgctatcggtttgaagaacaccactactggtgactcattaactgacccagatcacccacttattttggaaagcttgaaagttccagatccagttatccaagtatcagttgaacctaagtcaaaggctgaccgtgataagatggacgttgctttgcaaaagcttactgaagaagacccaactttccgtgctgaaactaacccagaaactggtcaaaccttgatttcaggtatgggtgaacttcaccttgacatcatggttgaacgtatgagacgtgaatttaacgttgatgctaagattggtgaaccacaagttgcttaccgtgaaaccttcaccaaggaagctaaggcacaaggtaagtttgttcgtcaatcaggtggtaaaggtcaatacggtgacgtttggattgactttactcctaacgaagaaggtaagggttacgaattcgaagatgccatcgttggtggtgttgttcctcgtgaattcattccttcagttgaccaaggtttacaagaagctatgaagaatggtgttcttgcaggttacccattgatcgacgttaaggctaagctttacgatggtagttatcacgaagtcgactcatcagaagctgccttcaaggttgctgcttcacttgctttgaagaatgctgcttcaaaggctggcgcagttatcttggaaccaattatgaaggttcaagtaactactccagaagaatacttaggtgatgttatgggttcaatcactgctcgtcgtggtaccatggaaggtatggaagacagagccggtgctaagatcatcaactcatttgttccactttcagaaatgtttggttacgcaactactttgcgttcatcaactcagggtcgtggtacatttactatggtatttgatcactactcaccaacacctaaatcaattcaagctgacatcattaagaagcgcggcggagatgctgaatagcttccgttaagaactgattaatgcagttagcttaattgaaaacaatttcatataaaaaagagttatcatttttattcaatgtcattaagttaagacattgacaattaatattagacttttaaagcactgatttaacatttaattggttaaattggtgcttttttcgtacaacaaataaggcatagcacagattctgcttttttaagctacgcgatataaataatatacagctgatttgggcttaatatttctcttgtccttgcggcctggtctaattggaatggtataatagctgatctgaataaggatccgttcaaaatcttgcgttaaagaagaagccaaatacatgctctgaataatcaagcatgattgcttgaaattgatggcatattgatacttgcaatgcttttgcggaatataggcctgtgcatcaatttgactgattgcattaaacataatcatatgggcataaatttccatttcaataaatttatcttgtttggaatggaactgtacactgcctaaagaatacttcaatttcttgaaggaggtctcaataccccaacgcagatgataaagctctttaattctttttagcggataattttttcgatcaagattggttagcacaacttcccattcttctttgcctgatttggcatcattaattctaaatttgcaggctcgaaattttattgtgcataactcgccaaaatcccagcttagatcctgggtatttttagagcgatacttaatatattggcgataatgatgctggacatggtgaatattctcactggctttatgcgtgatgtagtaatagttagaagtagttaccaggcaggaaatctcacgatcacattcttgatcaggcaatgtcgttatttctttaactccgccttgtccagccttagttcgtattatgtaatgacagttaggcaggcgattgcagttttcaatcatattgaaactagtgtagccacgatccattgttacaatatatggaccacaattcaaagctttaagcatttgaacagccgctttgcgttcatccatttctgatttaggctgaaaaatacaatcctggtaggtattattcaatagatcatataaggcattaacgtgaatttgacaatagggtttctttttatgagaagaagcttgtacaatgttattcgatttcggattccagatttgattaaagtcagagccatcaatggcaaacaaacggtagtgatgatcaaaaagttgaatattaaatagattttgattaaaaacagtcagaatatgtttaaaacaagcaggagaaagctggcttttgcgttgaacataggcagaagtactaactactttatcgttctttttagttgcatcttcgccaaaagctctaaagagttcactgtttaaattctgaccttgcatgttaattgtagttttaaggactgtcgctgcatctaaagtgcgtttcctggtaaaagcatgaggattattaataaaatcgtgaatatgatccccagtattattgataatttgatcaagacgttctagaatattcttatgaagggctttcataattaacaccatctttctggcaataattttgaaggtttaaaatatataatatataagataggcgaaaaggctggtcttttcgcctttattttatacaaaaaaagagatcgaatccaaatgattcgatctctaaaaaagcacccttaattgtcaatgtcttaacttaatgacattgcatttttattttgataactctttttttgtaaataaatttaagaaaaaagtcgtaaacccttgatatttaaggagggacaaagtacaatagtttttgtgcttatgggacagtgtgcccttaagtgtgaaaatcgttgtaaagcgttgacgcaaaaggttgcggcacgccaggctgcattgccacagtggcgtgcggggaatttttgccgagcgagtcatcttttaaagaagacgttaaggaggtaatttaatggcaagtcaaacaattcgtattagacttaagtcttacgaacatggtattctcgatgaatcagctgctaagatcgtagctactgcaaagagaactggtgctgaaatttcaggtccagttcctcttccaacagaaagaactttattcacagttcttcgttcaccacacaagaacaaggactcacgtgaacaattcgaaatgcgcactcacaagcgtttaatcgatattttgaatccaacaccaaagactgttgattcattaatgaagcttgatcttccaagcggtgtagacatcgaaattaaactgtaatttaaatagaaagaggtgtaaacatgaccaaaggaatcttaggaagaaaagttggtatgactcaaatctttactaaagatggtgtccttgttcctgtaactgttgttgaagcaactcctaacgttgttatgcaagttaagactgttgaatcagacggttacgaagcagttcaattaggttaccaagacaagcgtgaagttttgagcaacaaaccagaaaaaggtcatgctgataaagcaaagacttcgcctaagcgcttcattcgggaaatccgcggtgttgagcttaaggactatgaagttggctcagaagttactgtggatacatttaaggaaggtgacgttgtaaacgttactggtacttcaagaggtcatggataccaaggtaacatcaagcgttggggccaatcaagaggaccagaaactcacggttcaagataccacagaattcctggttcaatgggttccatcattaaccgtgtaccaaagggcaagcgcttgccaggtcacatgggtgtgaagaaagttaccattgaaaacttagtaattgaaaaagttgttgcagacaagaacgtattgatgattaagggtaacgtcccaggtgctaagaactcattaatcgttgttaagactgcttctaaagctgtaaaggctgataaataggaaggaggactagaatggctaatttaaaagttatggatcaaaacggtaaagactctggtgaagttactttaaacgataaggtttttggtattgaaccaaatgaaagtgtcgtttttgaagcaattattagacaaagagccggcaagcgtcaaggtacctcaaaggttaagaatagatctgctgttcgcggcggtggtaagaagccttggagacaaaagggtactggtcgtgctcgtcaaggttctatcagagctccacaatggcgcggtggtggtacagtctttggcccaactccacgttcatacgcatacactatgccaagaaagcaacgtcgtttggctattaagtcagttctttcccaaaagttgattgacaatgatttaattgttttagataagttgactatgtcagctcctaagactaaggaattagtatcaatgttaaacggcttaaatgctgacggtaaagttttaattgtttcagatgataacaatgtacaactttccgcaagaaacttgactaaggttaaggttgttccagttaatggcttaaacgttgaagatgctgttaactatggcaagttgatcttagatcaagatgctgttaagaagatcgaggaggttttggcttaatggacgcacgcgatatcattttaagacctgtcattactgaaaagtccacgaacttaatggatgataagaagtacacattcgacgtgcttttaactgcaaccaagacacaagttcgcaatgctgttgaagaaatcttcgatgttaaagttaagaacgtaaacattatgaacgttcgcggcaaggacaagcgagtaggtcgttacactggtaagaccgctcgtcgtagaaaggctatcgttactttaactaacgattcaaacgacatcaagattttccaagacgataacacagaagacaacaagtaataggaggtcagtcaattggctattaagatttacaagccaaccacgaatggtcgtcgtcatatgacttcttccgactttgctgagatcactaagacaaagcctgaaaagactttacttgaatctcaatcacatactgcaggtcgtaactcatatggtcatatcactgtaagacaccgtggtggtggtcacaaacaaaaataccgtatcatcgactttaagcgtaacaaggacaacgcaaaggcagttgtaaaggctatcgaatacgatccaaacagaactgctaacattgctttgcttcactacactgatggtatcaaagcttacatcttagctcctaagggcttaaaagttggcgatgtagttgaatcaggtgattcagttgacattaagccaggtaacgctttggaattaaagaatatcccaactggtacttcaattcacaatatcgaattaatgccaggcaagggtggccaactcgtaagaagtgctggtgcttcagctcaagttttaggtgctgatggtgattacactttagtaagattacaaagtggtgaagttcgtaagattttgtcatcatgccgtgcaactatcggtactgttggtaatgaacaacactcattgattcaattaggtaaagctggtcgtaagcgttggttaggcaagcgtccacaatcacgtggttctgtaatgaaccctaacgatcacccacatggtggtggtgaaggtaaggctccagttggtcgtcctcaacctatgactccatggggtaagaaggcacgtggtattaagactagagataccaagaaggccagcgagaagttaatcattcgtcaccgtaaaggtagcaagtagtagaaggagggttaattaatgagccgtagtattaaaaaaggtccttttgctgatgcatcattgttaaagaaggttgatgcacaagcagatgcagataagaagcaagttattaagacttggtcacgtcgttcaactattttcccttcctttgtaggtttgactatagctgtttacgatggtagaaagcatgtcccagtatatgtaactgaagacatggttggtcataagttaggtgaatttgttccaacaagaactttccacggacacaaatccactgatgataaagccacaacacaagcttagaggaaggagaaacatctaaatggcagaacaaattagttcagctaaggctgaagcaagaactgttcgcatcgctccaagaaaagctcgtttagtcgttgacttaattcgtggcaagagcgttgctgaagcattagcaatcttggaatttacgcctagagctgcttccccaatcgttgaaaaagttttacgttcagctattgctaacgcagaacataactacgatcttgaaagtgcaaacctttacgtatcagaagcttacgtaaatgaaggtgcaactttgaagagattccgcccacgtgctaagggtatggcttctccaattaacaagagaaccagtcacgtagttgtagtagtttcagaaaagaacgattaagggaggtatattaatgggtcaaaagattaacccaaacggttttcgtctcggtgttatccgtgattgggaatcaaaatggtatgctgacaagggatacaaagaaactttaaatgaagaccttcaaatcagaaaatttatttcagaaaagttgaaggatgcctcagtatctactgttgaaattgaacgtgcagctaacagaattaacatttcaattcatactgctaagccaggtatggtaattggtaaaggtggttctgaagttgaagctttgagaaaacaattaaatgctttaactggtaagcaagttcacattaatattgttgaaattaagaaaccagatcttgatgctaagttagtagcagatagtattgctcgtcaacttgaagctcgtattgctttcagacgtgctatgcgtcaagctactcaaagagctatgcgtgctggtgccaagggtattaaggttcaaacttcaggtcgtttgaacggtgccgatatggcaagaagagaatggcacacagaaggtcgtgttccattacaaactttgagagctgatattgattacgcttgggtaaatgccttcactacttatggtgaaattggtgttcaagtttggatcaaccgtggcgaaatcttacctactcgtaagaataagccagcttcaaagccagcgaagggaggaaatagataatgcctttagtaccaaagcgagtaaaacaccgtcgtgaattccgtggtaagatgcgtggtgctgctaagggtggtaaatatattgcctttggtgaatatggtcttgaagccctcgaatcacattggattactaaccgtcaaatcgaagcagctcgtgttgctatgactcgttacatgaaacgtggcggtaaggtttggatcagaattttccctcaaaagtcatacactgctaaaggtgttggtgtacgtatgggttcaggtaaaggtgcaccagcaggttgggtagctgtagttaagagagaaaagattatgttcgaaattggtggtgttgatgaagcaactgctcgtgaagctttacgtcttgcttcaactaagttaccaattaagactaagtttgtaactagaagttcggaagtaggtggcgaatctaatgaaggctaaagatatcagagcattaaccactgatgaaatgttagaaaaagaaaagcaatacaaagaagaactcttcaatttgcgtttccaacaagcaacgggtcaattagaaaataccgctcgcttgagcaaagtccgcaagaatatcgccagaatcaagactattctgagcgaaaaagcgttagaaaacaattaatggaagggagctattaacttgagcgaaacaaacgaaagaaatcgtcgtcacgtataccaaggtcgtgtagtttctgataagatggacaagactatcgttgtagttgttgacacttacaagaaccaccctgtttacaacaagcgtattagatattcaaagaagtactacgcacaagacgaaaataacgaagctaaagttggcgatactgtacgtatcatggaaacccgtccattatctcgtaagaagcgcttccgtttagtaaagattgttaagaaatctgtttaatttgcggatttagtgaggggaggattacacagtgattcaaaacgaatcccgtttaaaggttgctgataactctggtgccagagaacttttagttattagagtcttaggtggttcaaagcgtaagaccggtaacattggtgacatcgtagtatgtactgttaaacaagcaacaccaggtggcgttgtcaaaaaaggcgacgttgtaaaagctgttattgttagaactaaatcaggtgcacgtcgtgaagatggttcatacatcaagttcgacgaaaatgctggcgtaattatcaacgcagacaagagcccacgtggtactcgtatctttgggccagttgcacgtgagttacgtgagaacgactttatgaagatcgtctctcttgctcctgaagtcttataattgatagtgaggtgcactgatgttcgttaaaactggtgacaaagtaaaagttattgccggaaaagataaaggtaaagaaggtactgttctttctgttaacgttaagaaaaaccgtgtagtggttaagggcgttaacaagattaagaagcaccaaaagccttcacaaagcaatgctaatggtggtgtagttgaatcagaaggttcaattcacgcatcaaacgttaaagtaattagtagtaaaaaagaagataagtagaagggaggacacacatggcaagttatttagctaaggaatacaacgaaaaggtagctcctgcattagaagaaaagtttaactacaagtcatctatgcaagtacctaagatcgacaagattgttttaaacatgggtgttggtgatgcagtttctaacgccaagaacttagatgaagcagttgaagaattaactttgatctcaggtcaaaagccattaatcactaaggccaagaaatcaatcgctaacttccgtttacgtgaaggtatgtctatcggtgctaaggtaactcttagaggcgacagaatgtacgatttcttgtacaagttaatcaatgtttctcttccacgtgttcgtgacttccgtggtgtatcaactcgttcatttgatggtcgtggtaactacactttaggtattaaagaacaattgattttcccagaaatcgattttgataaggtaaaccgcactagaggtttagatattgttatcgtaactactgccaacactgatgaagaagctcgtgaacttttgactcaatttggtatgccgtttgcaagatagtggaggacattaatggctaaaacatcacaaaaaatcagaaatcgtcgtcctgctaagttctcttcacgcgaatatacacgttgcgagagatgtggtcgtccacactccgtataccgtaaattcggattatgccgtatttgcttaaaggaattagcacacaagggtcaaatccctggtcttaaaaaggctagttggtagtatacggttaggaggatagcttaaatggtcatgacagatccaatcgcagattacttgactagaatcagaaatgccaacatggcaaaacacgattcagttgaaattcctgcatcaaacattaaaaagtctatttcagaaattttgaaacgtgaaggcttcatccgtgattacgaagttgcagatgataacaagcaaggcgttatcaaggtattcttgaaatatggtccaaatggagaacgtgttatctcaggtttgaagcgtatttctaagccaggtcttagaaactacgttggcgctgaagacttacctaaagttcttaatggcttaggcattgccatcgtttctacttctgctggtgttattaccgacaaggaagcaagacaaaagaacgttggcggcgaagtaattgcctacatttggtaatactgacagaaaggagaacaatcaatgagccgaatcggtttaaagactattgaagtccctgacagtgtcactgttaccaaggaaggcgacaatattactgttaagggcccaaagggtgaattaactagatacttcgatccaaagattaagtttgaacaaaaagatggtgaaattaacttttcacgttcaagcgaaagcgacaaagcacttcacggtactgaaagagctaacttagcttcaatgatcgaaggtgtagttgacggttataagaagactttgaagttaatcggtgttggttaccgtgcacaagcacaaggcaacaagattactttaaatgttggttattcacacccagttgtattgactgcaccagaaggtgtttctgtaaaggcaacttcagcaactgatgtagaagttgaaggtgtttcaaagcaagatgttggtcaatttgcagctgaaatccgtgccgtacgtccaccagaaccttataagggtaaaggtattcgttatgttgatgaatacgtacgtcgcaaggaaggtaagactggtaagtaataagtagttatttttgaggtgaaattgtgatttctaaaccagataaaaacaagttacgcttaaagcgtcatagacgtattcgtggaaaaatttctggtactgctgagcgcccacgcttaagcatttttcgttcaaataaaaacatctacgctcaattaattgatgacgtagcgggtgttacgcttgcaagcgcctcaactttggatgaaaatgtatcagatgcaactaaagtagaacaagctgctgctgtaggtaaggcaattgctgaagctgcaaaggcaaaaaacatttctactgttgtattcgacagaagtggttacttataccacggccgtgttcaagcattagctgatgctgctcgtgaaaacggattagatttctaggaaaggagaattaacacatggcaaaccgcaatgattctcgtaacaatcgcagaaacaaagacgatatcgaagatcaattagtcgctgtcaaccgtattactaaggttgttaaaggtggccgtcgcatgagatttgctgctcttgttgttgttggcgacaagaaaggccgtgtaggttttggtactggtaaagctcaagaagtcccagaagcaatccgtaaggctgtagaagacggtaagaagaaaatgatcaatgtacctaaagttggtactactattcctcatgaagttattggtcactacggttcaggtaacattttattgaaacctgctgaagctggttctggtgttgctgctggtggtgccgtacgtatcgttatggatatggctggtatctcagacgtaacttcaaagtcacttggttcaaacactccaattaacgttgttcgtgcaactatcgatggtttgaagaagcttagaactagtgaagaagttgcaaaacttcgtcaacctgaaagagcttaagattagggagatcatagatgactgatttaaagattactttaattagaagtgttgctcaccgtctacctcaacaaagaaagatcgttaaagctcttggtttaggtagagtggatagtactgttgttcttccagacaacgctgctactcgtggtgcattattaaagattgctcacttaatctctgttgaagagattaacaaatagaatatcaaggaggtgccaaattaatgaagcttcatgaattacattctgctgaaggctcacgtcgcaatagaaaacgtgttggtcgtggtacttcaagtggttacggtaaaacttcaggccgtggtcaaaagggtcaattagctcgtcaaggcggtcatactcgtttaggttttgaaggtggtcaaatgccattattcagaactatgcctaagcgtggttttaagaacattaaccgcaaggaatatgcaattgtaaacttagatgatttaaacaagttagaagacggcagtgaagtaactgtagaatcacttaaagataatggcttagtaaagaaagaattgtcaggtgttaagttacttggcaagggcgaattaaaagttaagttaactgtaaaggttaataaagtttccgcatctgctaagcaagcagttgaagccgctggcggaactgttgaggtgatctaatgttttcgaccttgaagaacgccttcaaagataaagaaattagaaataagctctatttcacgctctttattcttttgctgtatcggatcggtgcaaacattaccgttcccggtgttaatgcgaaggcgatcacgcaggttgcgcaaactggtttagttccaatgctggatactgtatctggtggtggactagataactattcaatattttctttgggtgtttctccttatattacggctcagattgttatccagctgctacagatggatattgttcctacgttagtagaatggggaaaacaaggtgaagtaggtcgacgtaaaacaaatcaagtaactagatatttagcattagttgttgcttttatccagagtattggtattacgttaggctttaacgctttaactcaaatgggtttggtaaagaatcaaacaccacagacttatatagaaattgctattattatgactgctggaactatgttattaacatggttgggtgatgaaatcactgataagggtctaggtaatggtatctcagtaattatttttgctggtattattgcaagactaccaagtggtctatggcaaatttataaggaagaaattattaataatagtgctagtgatcgttggcaaggcattttgttcttcatcgcggttatagttgcaatccttatcgtaactcaatttgttacatgggttgaacaagctgatcgtcgtattccaattcaatatacgagaagagcgacgatgagtggttctgaaagttttctaccattaaaggttaatgtatctggagttattccggttatttttgccagttcatttattgttacaccggcaacgattttaatggcctttcaaagaacccagggcgatcaacaatggtttaaagtaatgaaccaaatctttagcttacaaactactcctggggtaattatctacactcttttaattatcttatttacattcttctacgctttcgtacaggtcaaccctgagaagctagcagaaaacttacaaaagcagggtgcttatattcctagtgtatggccaggaaaagatactcaggattatatttcaaagatgttgatgaaattatcaacagtaggttcattattcttgggcttagttgctttactgcctcaattggctactaacttttggaatctcccaagttccattggtttaggaggaacaagtcttttaattgtgattggggttgttctcgagttatctcgtcaaattaacggcttgttaatgaagagagaatatgttggattcatcagataggaacggataaatgattaacttaattcttttagggttaccaggtgctggtaaaggtacagcatcagagcgaatcgttgataaatatcacttaactcatatttcaactggggatatgtttagggaagcaatggctaacaagacgaaggttggtcttgaagctaagagttatatcgataagggtaatctagtacccgatgaagttactgcaaagttggttgaggaacgtttaagtcaacctgatattaaagaaggttttatcttagatggttttccaagaaccactgtacaagcagaacttttagatggtattacaaaacgtttggagaaacctttaacaaatgtcattgcgcttgaagttgacgaagacactttgattaagcgtttatcagcaagatacatgtgtaaaaattgtggagctacttacaacaagctttccaagcagccaaaagttgagggcacttgtgatcgctgtggtggccatgaattttatcaacgtgaagatgataaaccagaagttgttaagaatcgtcttgaagttaatgaaaagatgaatgcacctttgaaggacttttatcagaagaaaggcttgctcactgtaattaatggtgaacaaactccagaaaaagtctttgaagatattgatgcggtattgagtaataatcaatagaagaaaaatttgtataattttttatccgtgttataatttcaaagtatatgactgtttaattgcggaggaacaactttggcaaaagatgatgtcattgaagtagaaggtaaggtagttgataccttacctaatgctatgtttaaagttgaattggaaaatggagccacaattttagcacacgtttctggtaaaattaggatgcactacattcgtattttgccgggagaccgtgtgactgtggaattatctccatatgatttaactaaaggtagaattacgtatcggtttataaagtaatataacggagggaaacatgaaggttagaccatctgttaaaccaatgtgtgaacattgtaaagttatcaagagacatggccgtgtgatggtaatttgctcagcaaatccaaagcacaagcaacgtcaaggttagaaatagagggggtgtagtttatggctcgtattgctggtgttgacttaccaagagataaaagaatcgttatcgctttaacttacatttacggtatcggtgaagcaactgccaagaaaatttgtgctgatgctggagtatctgaagatattcgttcaaaggatttaactccagaagatcaagaaaagcttcgtgctgaagttgacaagtaccgtgttgaaggtgacttacgtcgtgaagtaagcatgaacattaagcgtttagttgatattggttcttaccgtggtattcgtcaccgccgtggacttccagttcgtggccaaaataccaagaacaatgctcgtactcgtaagggtactaagagaaatcgttaattttatttataaggaggtttattgatgcctgcaaagaaaacagcacgtaagcgtcgtgtgaagaagcatgttgaaagcggtgtagcacacattcactcaacgtttaataatactttagtcatgattactgacgttcaaggtaatgcagttgcttggtcttcagctggtgcattgggctttaagggtagtcgtaagtctactccatttgcagctcaaatggcagctgaagcagcagctaagagtgcaatggaccaaggcatgaaacatgtagaagtttcagttaaaggtcctggtgctggtcgtgaatctgctattagatcacttcaagcaactggtcttgaaattactgcaattcgtgacgttacgccagttcctcacaatggttccagaccaccaaaacgtcgtcgtgtttaattttgtccttgatataggacgtaacgttttgaaaggggcccagtaatgattgaatttgaaaaaccaaatattaccgttgttgaacaagaagattcttacggtaagtttgttgttgaaccacttgagcgaggctttggtactactttaggtaattctttaagaagagtattacttacttctattccaggtactggacttgtttatgtgcaaattgatggcgttttacacgagttctcaacagttcctggcgtcagagaagatgtaaccaagatcatcttgaacttgaagaaacttgaattaaagtctctttcagatgaacaaaaggttattgaattggacattgaaggtccagccacagtaactgctgatgatcttaaagttgatgcagacgttcaagtcttgaatccggatcaatatatttgtaccattgctgaaggtggacacttgcatatggaacttgccgtaaagaatggtagaggttatgttgctgcaagtgacaataagagtgatgacatgccaatcggagttatcccagttgactctttattctcaccaattaagaaggttaactaccaagttgaatcaactcgtgttggtaagagagatgactttgataagctcacttttgagatttggactgacggttcaatcaagcctaatgacgcccttagttttgctgctaaaattttagttgaacactttaaggtatttgaatcagcagatgcaaatgctaaattcagcgaagtaatggtggaaaaggaagacgataagaaggaaaagaagcttgagatgactatcgaagagcttgacctttctgttcgttcatataactgcctgaagcgtgctggcattaatactcttcaagagttaactgacaagacagaatcagatatgatgcgtgtacgtaacttaggacgtaaatcattggaagaagttaaaaataaattaaccgacttaggtctttcacttcgtcaagaagactaagcttaggtgaataaaggaggcaaatccatggcataccgtaaattaggtcgcgatagtgctcacagaaaagcaatgcttagagaaatgactactcaattaatcatgaacgaacgcattgttactactgaaactcgtgctaaagaagttcgtaagactgccgaaaagatgatcactttaggtaagcgcggcgatttagcagctagaagaaaggctgctgcatttgtacgtgacgaagttgcagatgttcacgaagaaaaagatgcagttgttgttaagtcagcattgcaaaagcttttcagtgatgtagcacctcgttacaaggaccgtaatggtggttacaccagaattttgaagttagccgttcctcgtaagggtgacgctgctccaatggttattcttgaattagtttaatttagagtaacacaacttaatacgtattaagaattatccatgaaagtgagaataagcgtaaagatgatggcgcaagcttagtctagcttagatgataaaaatcatccctcttcatgggtgattttttttgctctttttttctgttacaatatgctaataagcgatttaagaaaggaagtggaaaaatgccagtagatagtgctgttgaatttaaggatgtctcatttacctatcccgatactaaaaaagcgattcttgatcagattagttttaaaataaaaagaggttcctggacatctttgataggtcacaacggtagcggtaagtccacaatttctaaattaattaatgggttacttttgcctgattctgctaataattctagaatcactgttttaggaatgacgttaaatcaaaagacagtctgggatgttagggaaaaagtcggtattgtatttcagaatccagataatcagtttgttggagctactgttggcgatgatgttgcttttgggcttgagaatagagctgttcctcgggagcaaatggtaaaaatagtcagaaaagttttagcagacgttggaatgctggattatatagatgcagagccagctaatctttctggtggacaaaagcaaagagtagcaattgcaggtattcttgccgtagaaccgaaaattattattttagatgaatcaacttcgatgcttgatcctaaggggagagagcaggtgctaaaaattattaagcatttaaagaaagagaagaatttgacagttatttcgattacacatgacattgatgaggctaatatggctgataatgtgatcgtcttaaatgatggcaagattttagctcaaggaactccaacggaaatttttagtaaaactgaaatgttgcaagaaatagggctagacattccatttgtacaaaaattaataaataaattaaatgaagtgggaatttctgtacctaaaaatataaaaacgaaagatgagttgaaacaatatctatgtcaattaaatttgaaaaagtaaattatatctattctcccggaacttcaatggagaaaaaaggattagataatgtttcatttgaattaactgaaaatagttttgttgcattggtaggtcataccggtagtggtaagtcgactttgatgcagcattttaatgcattactgaagccgagttcaggaacaattgatattgctggttatcatattactgctcaaacaggaaataagaatttgaaaaagttacgcaagcgggttagtttggtttttcagtttcctgaagcacagctttttgaaaatactgtgcttgaagacattgaatttggtcctaaaaactttggagcaaccgatgatgaagctaaaagtaaagctttgaaatggttgaagcgagtaggattggataaatcgctagcaaataagtcgccatttgagttatctggaggacaaatgcggcgtgttgcaattgctggggtaatggctgatgaaccagaaattttatgcttagatgagccagcagcggggttagatcctaagtctcgtaaggaaatgatgaaattatttgttgactatcaaaaagcaggtcatactgtaatcttggttacgcataatatggatgatgtggccgaatatgcagatgatgttttagtgatggaacatggtaaattagttagacatgatgcgcctaaggcgatttttactaataaaaactggctagaaaagcactatttgagtgaaccaacggctagtctttttgcctcagatttgacgaactttaactttaaagataaaccgttaacactggatcagcttattaatgaaattaagaaaaatttgcgagggtagtttatgagtaagataattgtaggacgttatattccgggagattctcttatttataaaatggatcctcggagtaaattattagttaccatattatttatattggctatctttttagctaataattcaataacttatgcgattgtgaccattttttgttttttggctgtgatcgctacaggattaaatgcaaaagtattttgggatggcgttaagcctttgattggtttaattttctttacgtcgcttttgcaattgttttttatgactggtggtcatatttattggcattggtggattttttcattatctagctatggtttgattaatgcaatctatatttttattcgttttacattaattattttaatttcaacagtaatgacagttactacaatgccacttgaaattgctgatgcgatggaatggctgcttaagccgcttaagttgtttaaagtgccggtggataaaattgcgttagtaatttcaattgcgcttcgttttgtaccgactttgtttgatgagacttttaaaattatgaatgcgcaaagatcacgtggagcggacttcaatgacggtggtttaattcaacgtgctaaggcaattacgcccattttggttccgttgtttattcagtctttagaaacggcaattgatttatctacagcaatggaatcacgtggttatcgtagtagtgaaggacgaactaaatatcgcgttttaagttggtcaaaatatgatttaattgcattattttattttgtactgttagtcggattactattaacttttaggacatattagaaatatgacgacaagatataaaatgacgatggcttatgatggtcatctttttcatggctttcaacttcaaccagaccagcgaactgttcaggggacaattgaagatgcgttgaagaaaatgactaaggggcagcgtgtgattgtgcaggggtcaggtagaactgatgccggtgtacatgcggttggacaggtaattcattttgattatcctggtaaaactattccagccaatcgaatgattttggcaatgaattctatgatgccaaccgatattatctttgatgattgccaaattgttgatgagaattttcatgcgcgttattcgattaaggggaaatggtatcgctatcgtgttagtttagatcattttgttaatccatttaaacgtttttatacaggacattttccatatccactagatattgaaaagatgcaaattgcggcacaagatttgttgggaaaacatgactttactagttttgcggctagtggtggtcgaattgaagataaagtgcgaacaatttattatgtaaaaatcacagaggataaaaaagataatgaagtgatttttgacttcattggttcaggattcttatataatatggttcgaatcatggtagcagcgttgcttgagattgggaatgatcgtagaccagtgcatgatttgcagcgggtaatcgcggcaaaagatcgacaagaagtgagacaaacagctcatgccagcggtttatatctttatcatgttttttatgatgaagtaccacaaaaatatcgcttagatcagcatttataattgacattttgcctaaaaggacgtactctaatatagtatgtttgtccacgataggccccggaaacttattgttttcaaactgcaaataaacggaggaatttaaattgcgtactacaccattagcaaaatctagtgaaatcgaacgtaagtggtacattattgatgcaactgacgtaacccttggtcgtctttctgctgctgttgccactattttgagaggtaagaacaagcctcaatacacacctaatgttgatactggtgataacgttatcgttatcaacgcatcaaagattagattgactggtaaaaaggcttcagacaagttctactaccaccactcatcatggcgtggcggcttgaaggccgtttcatacggtgaattgcttgctaataacccagttaagatggttgaaatctcagttaagggtatgcttccaaagaacactcttggtcaccatgaattcatgaagatgcatgtttatgctggcgaagaccacaagcacgaagcacaaaagcctgaaaagttagatattaacaaattaatctaggaggttatataatggcacaacaagctgcatacacaggtactggtcgccgcaaggattcagttgcgcgtgttcgtttagtaccaggtaacggtaagatcactgttaacgataaagatgttgatcaatacattccattccctaacttggttaaggacttgaagcaaccattgacattaactgaaactgaaggtcaatacgacattcacgttaatgttaacggtggtggtttctcaggtcaagctggggctatccgtcttggtatcgctcgtgcacttcttgaagttgacccagacttccgtagtccacttaagaaggccggtttcttaacccgtgacccaagaatgaaggaaagaaagaagccaggtttgaagaaagcccgtaaagcttctcaattctcaaagcgttaatatttacgttcaaaaatgttgttatatcaacgttttggagacttcagttggtcacctatggtcacaatgctatagggattccaatagatttaaagcattcgcatcttgcgagtgctttttttctggcattaattccagatagtatttttcagtagttaagattgaatcgtgtcctaatcttctgctaacataagataaaggaatattattactgaataaaaaagaagcgtgggtatctcttaaaccatgaaatgtggttgaagggatgcctatttttttgagcaattcttttaacataccagactgtttaaagctgaaccagtcaaacaaatagccagaatctttttgagagatatccttcaatagatcgtaaatattcttaggaatagtcacactgcgtctagaatgtttagtttttaatttagtatcgtcagtagtagggctaattgatcgttttacttcaacgcaataatactgaccatcgtaatgcacatcctcaggcttaatacctaaaatttcaccacgtcttaaaccagtactaatctcaagtaataccattaagttaaattcattatctgtatgttcaagtaagtaatgttttaacttagttagatcagacattgatgaagctttattgcgtttaggtaattcttttccgtgtgctttaagtaaactagcaaaatcattgtaaatgtatcccttaacataagcatagcggagagcagttctaattttcttaagtaattcagttaccgttttcttagaatgtgttttgccatatttatctaagatactttgcatttgtacgtcatcaagcttaccaagtttagcggttggaaaaagattatcaattactttaccagctttaacataattatcaaaagttgcttttctaacgtcatgtacttttactgtttgaacgaataaataataaaagtccttgaataaagtgttttgctgggctattgcttgacctttagccttttgtagttcaagagtagtactccaaactttagcttctttttcagttttaaaactcttagttaagtaatcacgttttccgagactgtaaaatagtttgtgtaaggatgaatgattccttaaatttatttctttaaacattagaaaaaggagttcctttctcgtatgattggtttgaacaaaaaaaacacatacagaaagaagaactccttcatgaatgattttaccaaagattttgctcaagctctattcaatccagacaaaataaatgatttattgcgcaaagaactacaacaggctgttaataacttgctagaagctgaattgactgcctttctgggctatgatccctatgccagaaatggctggaatactggcaactctagaaatggtgcttatttccgcaaagttgatacgcaatttggcccaattgaagtgcaagtgcctcgggatcgcaacggtcaatttcatcagcacacgctgcctgactacaagcagcactcggatatcttggaaagcatgattatcaagctttactccaatggcgtgaccaccagggaaatagccgatctaattgaaaagatgtatggcagccattacagtccagctcaggtatcaaatatttccaagcagatgattccaaaggttgaggcttaccacaaacgcaagctaagcgacaagtttttctgcgtctatttggatgcgacataccttcctttgcgccgagaaacgtttgagcgtgaagcagtctatattgccattggcattaaacctaatggacataaggaagtcattgactactgcattgctcctagtgagaacattgaagtctggacagagatgcttcaaaacatgaagtcccgaggcttgaagcaagttgaactctttctttctgatggtgttgttggcatgaaaacagccttggccaggacttatcctaaagctcattttcaacgctgtttggttcatgtcatgcgcaatatctgcgctaaagtacgcgtcgacgatcgtgaaaagatcatgaacgaattcaaacaggtgcatcaacagacaaacaaaaaagaagctgcagctgtcttgcacaaattctatgccaaatggaataaagcttatagccatgtcatcaaaggtttgaaggaaattgagcccgatctgctagtcttctacaattatcccaaacaaatcagagcttcaatttattcaaccaatatgattgaatcctttaacaacgtcatcaagcgtaaagctaagcctaaggcagaatttccaactgaacagtcgcttgatgcatttattggcatccaggcaatgagctacaatgaccgttatttcaatcgaattcataaaggctttggtcaggttcaggacaccttagaatcctactttgattaaataaataattaaaaaatcaatttacgagaaagatctatttacacaaaagatttgacagtttccgttttccatgttgatagattgttactctggctctatatgatgagccacgtttttcaatacttgccataaatttaatcgtcctttcaaaagaaaagccgattatcttaccagcaataaagttagcagataaccgactatttctcaaatctttttcaattttgtttctttaagatcgatgaaagcttcgatacttttaatggtaaagcgttctgtgtgttctcctagtttaaatcttttaaagtcaggatcagagcgaaatactttatcaaaagttttgggatcaataccaatatattttgaagcttcttcgcgagttaataatttagccactattattctcctgagattgtttagttaccaatattgagataaaatctaggtagtaggtaatctagtcattgcttttgtctctattagcatgactagtatttttttgcgattttatcttccaaattgcttcggataatttatcatcagtgattagatcatttttaactttattagtattgcttttagtaagttgcaacgggataattcgtcttttcaactgttcaaaagaatcaatgacttgattagcaatattacattcaagataaaaactaagtggatcataaggggtagtgatgtaaatggcacgcgcatttagataacgatcgtgataccttgcgggagccattttgtctatttcccaaggatccaaaagggtaagtagttgaccatagtcatagtcatttggtcgcaagtcattaattactatgaatttttgccctttgtattcttgaaagtgatcccgttgactacctgaaatacagaaatcttcaggatgttgtttttctaaaatttcccgtactaacttagtcttaccaattccggaaacaccatatatccagtagaccttacaactctgacctttgaagtcctttaaaaaccgttgatgctttttgtaagctaggatgtcttcaatatgatctaacagtgttttatgttttgccatctcaagaacaccgatttcttcttgaagttcttctttagtgattttttcatttgaataatcatcaataaagttttcaattgcttgtcgtgatggctttttgactttttgtctaatctcattgattctatctttaaaatcaaatgaagctactacttcttttggatcataatgatgtttactcttagcattagtagtttcatggatcagatagctatagccattgttaataatactgtgccatgcttcaatatattgttcatgatcattgaaaatcttagatactcttgaaatggttttagcatctttgaaatgaagcattacatgatagtgaggtcgaatcttttaacttatctttactaaatggtaaatgatctaaatcttgggtatacataaagttgtgagaacgtattatttttttcacaattaaagatttcctttctattcaacacgaactacatattaactttggggctagataacaagttcattattactttatttttgtttatcagatggaaagcaattgcaagaagcagcagatatattagccaaggctaaggtgcatctatctatggtgatattttcaccttaaatcaaactgcagcagctatggttaaagttgctcaaggaggtaataagggtaaagtattactgcaaatgaatgaagcttaagttaacatgaaataataaatacatttagataaagaaagaccctcaaagattctaaatttgaatttttgagcgtctttttagattgctaatcattttaaaggtacttgtattacatttactcctgctttaataaattcattaattacactgttttctacaaaagtatcagttattaataaatcaatatcttttattgttccaatagtaaaattagagaatttattgaacttgctatagtcggcaacaacaataaccttttgtgattgctgaataatagttttattaacttctgcttcttccataactggtgttgaaataccttggttaatgctaattcctgcgcaaccaataattgcatagttggcacgtaaagatagaaatgctttagttgccaaatcaccgctcatgattaatttatgatgtatttccccacctgttaagatcactttgcttttagtattttcaaaatttccagcataaccattgttagtaacaattattatatcctttgttaataaatgtggaattgcatcaaaggctatactactagagttaataaatactatatctccatcgtgaatatatctggctgcctcttttcctaagctttgcttaatgtaactaacgggctgagataatgggatttcttctggtgcaacaagggatatgacaccacgcttttttgaaatcttacccatttttgacaaataatcacagtctcgtcgaatagtcatttcagaaaccttcatctttttgcttaattcagaaatagaaatttcccttgtgtgatttagtaaatcaatgatttgcttgcgacgttttttaattacttgaattgaatttttcatttttaatgatctctttcacttcaataaatacttactaatacttcaccagaaaagcattaacttttgaatttaaataaaaaacgacccgaactggttactattttaccattcaaaataataattcacatattttatgttataaagtaagtgtcaatgtttttcctgaattgtcaaattaagtgcaacagttaggttatgaagagatatattgcttgaagagttcctctgctgtgtgatattggaggattcggcgatatttgtggttaatggcatcagttgcctgttgaacataagcttttgacttgtctttcatgctcttgcccttagggaagaattgacgcaaaagaccattgcagttctcattggtgcccctttcccatggagaatatgggtgagcaaagtaaatctggcagcccttgatcttggtcatatccgcaaactcagagccattgtcaaacgtgattgatttaaaccaggcaggatgtctgtcaatctccttttgaagcagcctttggcatgtgcttgcccgatagtcaggaatcttgataactacttcaaagcgtgtggttctttcagtcaaagtcattaaagcaggctgattcttgcgtctgacgcctttaaccagatctccttcccagtgcagcggagcttttctgtcttcaacctccttaggacgctgttcaatggaattgccaagatgcttcttgtgcaaagcgtgaccgccatggctgtgatgacgcttgttcctgcgtcttttgagcttcataggcagatcaatattgcttatgtccagcaagccctgatcaatatagcgatagacggttggtgtgctgggacaagggtagcctggcatagtccttttgaattcaccaacgaactcatcgatgctggtggcatcaaatttagctttaaagcgtctggagagcattctcaaaaagacagcataatgcttcaatggattgcgctgatagcagtttttgcgacgcttctcataataaatctgtgcagtatcagcgtaatagtgctcatacaataaatagctgctgtctctttgcaggacgcttccgcgtttgatttcgcgactgattgtcgacttatggcagccaacttcttgagcgataacagtacgggaagttatgccggaatccagcattgcttgaatttgtccacgttgtacgctggttaattgatgatagtgcttagaaatgctagaatttgaattggtcatgaagatcttcctttcttgatttttcgtcacttcaagtttaggtcttcatggcctttttgtttaacacttagtgttgcacttcaattttaaatccgggagactatcaagtttacgttgcaacaaaagaaaataaagttgttggttttgtcggatttaacgaagaagagcttggctggctctatgttgatcctaaagttcaaggacaaggtattggtagtaaactgattgattttacgcttgaaaattcgaccaggccattttatttagaagtgcttgagggcaatcctgcacaaaagctttatctcaaaaaaggtttcataacaattaaacatgaaagtggcaagatgccaggtaatgaatcatttagtgttgaagttgacctaatggaatataaataaaacatcccaatcaggtgtgttttttgttagacttataaaaaatgaagctagtcaataaagtattgtcttgtcattagaaagtactacatatgaagtatatttcatgaagtccgcttcatattttagggatgatgattatcaataataaaattaaggaataccgcaaaaaacatcaacttacacaacgcgagttagctgaaaaagttggtgttacagaacggacaataatttcattagaaaagggtcggtacaaaccatcgattgttttagcttataaattagtacaattttttgagacagatattgaaactttattttgcttaaatgagtatgtgaagaatgagcaagccaaaggaaggaatgcttacaattctttttgcgattctatcagtcatacagctcttagaattaatttatgatgttgcaaatagaaaaagcgtcaattatattcaagatgttatttggttaatattgggcatctgtttgacagtcggttatttctatagtactaaatatatcggtatagccaagattgaagaagatgatgaacgcgataaatttattcaaactaaaactaataatcaagcattcaatattttacagtgggtcctttttgttttaggtgcagtaacgataataattgatgttaatctcggccaaatgggattagattctcgtgcaatggttattatagttgtaggcgttgtattaatctttttatgggcattttcttggattttgcaattaatcttaatgataattaattatttttgcaattgagactacaaaaaataaagcgactggattagctccaatgtcattaagttaagacattgacaattaagggtgcttttttagagatcgaatcatttggattcgatctctttttttgtataaaataaaggcgaaaagaccagccttttcgcctatcttatatattatatattttaaaccttcaaaattattgccagaaagatggtgttaattatgaaagcccttcataagaatattctagaacgtcttgatcaaattatcaataatactggggatcatattcacgattttattaataatcctcatgcttttaccaggaaacgcactttagatgcagcgacagtccttaaaactacaattaacatgcaaggtcagaatttaaacagtgaactctttagagcttttggcgaagatgcaactaaaaagaacgataaagtagttagtacttctgcctatgttcaacgcaaaagccagctttctcctgcttgttttaaacatattctgactgtttttaatcaaaatctatttaatattcaactttttgatcatcactaccgtttgtttgccattgatggctctgactttaatcaaatctggaatccgaaatcgaataacattgtacaagcttcttctcataaaaagaaaccctattgtcaaattcacgttaatgccttatatgatctattgaataatacctaccaggattgtatttttcagcctaaatcagaaatggatgaacgcaaagcggctgttcaaatgcttaaagctttgaattgtggtccatatattgtaacaatggatcgtggctacactagtttcaatatgattgaaaactgcaatcgcctgcctaactgtcattacataatacgaactaaggctggacaaggcggagttaaagaaataacgacattgcctgatcaagaatgtgatcgtgagatttcctgcctggtaactacttctaactattactacatcacgcataaagccagtgagaatattcaccatgtccagcatcattatcgccaatatattaagtatcgctctaaaaatacccaggatctaagctgggattttggcgagttatgcacaataaaatttcgagcctgcaaatttagaattaatgatgccaaatcaggcaaagaagaatgggaagttgtgctaaccaatcttgatcgaaaaaattatccgctaaaaagaattaaagagctttatcatctgcgttggggtattgagacctccttcaagaaattgaagtattctttaggcagtgtacagttccattccaaacaagataaatttattgaaatggaaatttatgcccatatgattatgtttaatgcaatcagtcaaattgatgcacaggcctatattccgcaaaagcattgcaagtatcaatatgccatcaatttcaagcaatcatgcttgattattcagagcatgtatttggcttcttctttaacgcaagattttgaacggatccttattcagatcagctattataccattccaattagaccaggccgcaaggacaagagaaatattaagcccaaatcagctgtatattatttatatcgcgtagcttaaaaaagcagaatctgtgctatgccttatttgttgtacgaaaaaagcaccaatttaaccaattaaatgttaaatcagtgctttaaaagtctaatattaattgtcaatgtcttaacttaatgacattggattagctctggtcgcttatttaaattttagtatggcatttctttaaaaaattagaatatcgatctttttcaccgtttaccttccaatattaaccattcaccgaaatttttaaatttaaaatattttttcgtctatactgataagcaagaaaggagaaaaagggatgaaggtaaaatttaacattgataatcaattagcgggagaaagtgctgaattttggttaaaaaagatgactaataaattcagtcaattgggtaaagaattaagtggtgaacaagacacgatttggtgcagttatgatgatgaaattattcctgtgaagtttgaaaatatttatttaattcaagtcgaacaagagcaaactttaatttatgacaaaacacagagttacaggtataaagggcaattatatcaggttaaaaatattttgccacataattttttaatagcgtcaagaagtgcaattattaattatcaaaaaattgatcatttggaagttatggatggtggcaatattgatgtcattatgaagaaccaaatgcgggtacaaatttctagaagaaaaattaaagacttgaaagagaggttagggttatgaaaagaatggaatctttcttggtaagtggaataagtggcatgggaattggattaacttggtattcaatagtaactttatttcaaacgggaacgaattggaaaaatgctcaaattccgtttacaagtttgctcttttatttgattgtctcttttgtgatgggagcatttttcaatttgacaggattgatttttgaacaaacgcaatggtcactacgaaaacaaattattgtaaacttttttgttagctatgttgccttttttgcttttgaattagtgattaatgatttggctttatcggttcatttcttcttagtaattactggagtatttgtcttgatgtacttgctcgcttatggtttgtactttttacaattattgcgagatgttaaacaaatcaatcaaaaattgaaagaaaagtaaataatcaaaaacgatcaagcctaaaaatcttgatcgttttttcgttggttagataaaaattataaactgtcttgaatattatcagctaagtagtcataaagcataccatgctttaattgcttagtatcaactcccaaagcttcagcaattgcataggcaaaggcccaagcggtagcaggaccacggcttgttaaaattttatgctctttatcagtaacggtgattttctctgaaaaatgagcacttggggcatcttttaagcattcttcttcaatgcctggataacaagtgaagtccgcatctgccaaaacaccatagcgagcaagagcacgtggagcagcacacattgcggcatcccacttgccagcttcatgacgcttaatcatcagatcacgtaatttttcattatcgcgtaagttagcagaaccagtcatgcctcctggaaaagcaaccaaatcataatctaataaactgtcatctacaactttgtcacaagtgatttcaatatgatggtcaccatctacttttttacttattaaacctaccatatcgcattcaacgttaagtctacgcaatacgtcaacaacgcttaaaccttcgacttcttcgcaaccgtctgcaaatactacagcaacttttgtcataaaatcatcctttctataactattttaattatctacttacattagatctaagtaaaatgaaagatctgctaatttgcttaaatgaagagtaggatgaggtgaaattggtatcttgtcttttttaggtgccagccataatgattttagattggcattttctgcaccttgaatttcttcatccagattagttccaattactaaaactgtgtctggatcaatatctggattgtctttcagaatcttaaagaaaatatttttgcttggcagcttgtccgtaaaatcatcggcgaaataagcattgtcaaatgaagaaagcaattctgtaggtgcaaggcgcggttcgatttgagtgcgcttttctttagcaagcaaaatcaaatgcagcttgccactgacttcatcaataaagtcgatggcgcccttgactaacctggtttgatccttcattgcatcatcaaaaacagttcgcgttttagaaagatcttcttttaaaaatgtagataaagctaaatcgatttgatcattgctagataaatttttaaattctttttctaagctagtgtagcgtagtcgctcagctggtccccagtctaccccataatgttttaaagtttgccgcagcgcagttttttctgctaatttttcatttaataaactgccttcgggaataaaaattaaagtttcaaatgtagccatgaataaacttcctttgtgttagttcctattagaattataatgaactagacaattttaggaaaggaattaaaaaatgacaatctggaccgtaattttcttattattaggtggtgttgcaggtggcttattatcgtcagtggcctcaatggcatcacttgcatcatacccagttttgctagcagtaggaattccaccagtatttgctaatgtaactaatgatgcggcgctaatttggactagcatcggttcaactgtatcttctactaaggagttaaaaggacattggaagcaagttttgttctataccatttttacagttgtgggatcaattttgggttgtattttgcttctatcttttcctccaaagatttttgaaaaagcagtaccattctttattgctttctcaggattgatgattattgtttctggtaaacaccatagtttaaatactaagacacagcctacttggcttaaaataatttattttctcgcacttttagtcatggggatgtatacaggttactttggtgcagctggtggagtcatcgtactagtacttttaacttacattaccaatgataaatttattgttattaacgctatcaaaaatgtgatttgtggttttgctaatttagtagccttgattatatttatgtttacctctcatatttattggcttcaggcaattcctttggcaatcgggatgttcattggtggctatattgggccagctattttaagacgagtaccggaaaagccagttcgaattttcattgcaagcttggccttcattcaagccggttacttcttttatacggcatatctgcaataagtttggtacaatattaagcaatgaaaagggggctaaggttgatggcaacagaagtttatttggtacgtcatggtgaaacaatgtttaaccaattggacaaagttcagggttggtgcgattctcctctaaccgtgaaggggattaacgatctaaagagaaccgctaaggccttgagtcaagttcactttgataacatgtattcatcggatttgaagagagcaattgataccgttcacttgatgaaggatgctaatgtggtctcggatattggtaaaattaaaaagctgcctgaatttcgtgaggtcttctttggaacttttgaaggcgatgatattaaccagacttgggaacaagtagcactagccgcaggaattgaccatgaagatgatgtaactaagatcatcaatcaggtaggcttgcgcaaatttcgtgcagcaacaaaaaaggctgatccgcgtcatttagcggaaaatcaggatgagttagatgagcggatggtacgggcaattgacgttttgcgcgatttaactaaagatgaacaaagagttttgttagttagccatggtgactttattaaaactttgtccataaaatattggaataagagtaatggcaaaaacgatattgtttttccaaataatgggagcgttactcgtggaattttgcacgatgacggttcatttgaaattgttgattataatgtagatgctgaagagctataaaagtcctactgccgaagtagggccttttttggtacactgataacgaaaggaaaatattttatgaataaagatcatacaactaagcgttatgtcttcgtaactctactgaatgttgttattactattgctgaatttataggtggtattttttcaggttcattagcactgctttcagatgcatttcataatctgagtgatgttggtgcaattattttatcttttgtggcgcacctgattagtcgcaaaagtcgtaatcagtttaagacctttggttatgaaagagctgaaactttagccgcttttactaatggcgttatcttgatcgtgatcagtgtggttttgtttgttgaagcaattcaacgtttctggaagccggaacatattcacggtggcattatgctgattgtctcgattattgggctggctgccaatattatttcaatgctagcaatgcatagcgattccaaggctaatttgaatgtacggtcaacttttattcatatgttaagtgatgccttgtccagtgtagcggttgtaattggtgcgatcttcatttacttctggaatgtaacttggcttgacccagttttgactattttagtttcaatctttgttttgcatgaagcttatgaaaatacaatgaaagcagccaatgttttgatggaatctaatcctgatatcgacttgaatgaagtgaacaagattgttttatcgttccccatagttcaaaatatccatcatgtccatgtttggcgctacagcgatgactttattatgatggacgcgcatattaatgtagccccaggattaagagccgatgaattagagcagctataccaagatattggacaggagttacaaaaagagttaggtattaatcatattaccttacaagcagagtgcgagcgtggcagaaaagacaagatgatcgttccaggccacggtattaacgaagattaggtgaaagaatgtttaatgttaatatttttacagcgattattgtattgattatgggtatttatgacatgtcctatgcttttaataggcgtaagcaacctaccaataaaggcggcattagagcctttatggctttaggaattatcttcacgatcgcaggaattgttatgatcgttagagtattaatgaagtaaggaatcttagaatggctaaattagtattagttcgacatggcgaaagtgtggcaaatgctgccaatgtttatactggctggaacgatgttccgttgactaaaaaaggtgaagaacaagcagaaaaagctggtgaattgattaaaaccatttcggattttgctcccacccacattcatacttcagtcttatcccgtgcaattgtgacagcaaatatagtagccgatgtctgcaatttattatggctaccgatgactaagacctggcggctgaatgaacgccactacggcgctttaaggggccttaataaggacatttcacgtaaagtatttggtgtggaacaagttctattgtggcgacgtagttttgattcagttccacctaagcaggggtcgccaatgattgatcgccgttataagcattttgatcagcatttgatgccacgggcagaaagtttacatcaaactcagaaaagactcatgccatattattatgatcatatcgcatctcgattgatgaatggtgaagaccaactgatcgtagcccacggttcaagtttgcgtgctttgataaaaaagctagagcagattaatgatcatgacatcgtaaaactggaagttcctaatgcggaaccgattgtttatactatggatgatcacttaaagattattaacaaacaaattttacgtaaataatgttaaaaatgcaccttagtgcatttttttaatgctctaaatgaggttttacacatatctatggtaaaatctattatgatttctagtatatttagtttggagtattaggcatgcgtaaattatttttattacgaggtgcacctggctccggtaaatcttcttttattactcgccatcacttaaatccttatgcgatcagtcgtgatcaaattaggctactattggcggatttgacagtttactatcaagaggatgcggatgttttacaccaagtcattccgcggcacgtaactgtgcgtactgagcaaatggtggatcaccttgtagaacacaagatggaatatggggaaactgttattgtggatgggacgcatatcgttccaagtgcgattgaacattttaagccttgggtagacaagtatcactatgaatgctttgtagtagatctgatgcaacatactaccttagagagtttgcttaagcgtaatcagactagaatgcattacgattgggttaagcctgaagtggttaagcaaatatatcgttcttatgaagcacatccagaagtaccatactgggcacataaagttgtgccaaatcagatggatcatgcgttgtcacagcgtgagacaaatttagatcgttatgctcatgtgattgcggttcctgacatggtagatgaagaagattttccacatgtgcatatctcgaacttttatttttcatttaatgacaagtttacagaaaagtatggaacttatcgaaatgtagtttcaattgctaaaactgaagatgaagcagttaagcagttcaagttgccatattttgtctttaagtttcatcacaagcactttttgatttcagcttatccaattcgaaatgagatgttggatccgatcagaaaggttaagggagtttggacatattcaactggtttgtataatgtagcggattttgtgaaagaatttccggaaaataaaaagcaacatgtgcatcagttcaacttaagtaagttagatccaacccgcttattacatatttggtaaaaaagacgtagttagaacattttatctaactacgtcttttgtgtaatttacttatattttgttttacttcaatttgccggccttagctaaaacttctttagccttttcaagtgaatggtgttcttcacgataacgcttgatgtcatagccatcaacatcggttaacttgctaagtctatcatcaaggtctttgaattctttttcaagatccttaatgacgccttcttcatcttcaacgtaaacatactcattttcatcagctttggcatcaatcttagcatcgtattcgccgacttttctagcatgtttcaaaatagatttaatatccttaatcgtttcatgttgtgcagtacggtgacgacgatcaggtactgaatcttcaattctagcgaagtggctttcagcatcactaattttctttgaaattctatctaatgcttttaattgtctttttgaatagtctgtcatgcttttttcatcctacgtaaactttaccatttgaatcctctctaccgaattcgccttcgttgtaggcctaatatttttgggatacaagaaaggacacttgaagttgtaaaaaaagtgtcagaaatttctttccgacacttaactatttgattatagctattaatacttaaatgctaaggcacccattggatcccatggcaataattgaattgggttatctttgccttcatcgtaagccttcttaagatcttctggtaagaatttcttgttgataactgcttggtaaacaaatgaattaaaccaagaatcactcattacgaagtaacccttaaagccaggtttttcaccccatgagttttcgatcttccatttagttggcttaccgtcaacgatatcaacaccggtaatcaccatggcatggtccatcatgctttcaccagaatcaagcatgtcggctttagacatagtgaagtcagcatcaaataattgatcacggcggtaaaggttagtatcaagaagtccagcacggcgttcagaatccttaactacgtttgaaccgaaccaaacaacttcgccactcttcaattgtttaatgattaagtccttcatttcatcaactttaaggtttaagtggcgaacttggcgaccgccttcaacgttacctaagtattcaactgagaataccttgtggaaaggtttgtcgttagttggagcattgatagttgagatatggtttgctaaatccatgccaacgtacttgtcaaagaattcctttggggtaatgtccctgtcaatatggtaattcttgtcatcatcgcggtattcgaagttgaacttctttggtggaacacccaatgaagtagccaaaatacggaagacatcgtttagcatttcttccttgcgagcttgtacttcatcttctgacttgccatcttgaactaatttacgtaactcaagaccatctttacgaagcaaagtatttaaagtgtcgtttaatgcacttgaattagtagcattagcagtttctggataaacactcttaggaacgataccatatttttcaataataccgcaaagcatgtcccattgaccgccgtcttgttgaggagtcgcaaataagaatgaaactttacgatcgcccaagtccttatcagcagttgcgatcacattttcaaagaaccagttagacttttcaaatttatcccagaagttagtgtaattttgagataattcgaagtcctttaacttaaatttcttttgtaatgggtgacgcatagtgtttaaagcactgaacatccagcagcgaccagactgcttttgatcggcagggttacctgtatcaatttcgattgagaaggttggatctaggtcgatcttagtttgtaagttttgactagctttgtagataccgttttcttgagcagcgtgactagccacatcaaaaacagggtggttagctaagtcttgttcaaatttattaatagtatcattgttgatttcttttaccataaaaaaaatcctcctttataagtacttaaattaattttatcttattcaaaatgagtcgtctaataatcttatcgattaaatggacgatgataccaaattttgtgaaattgaggatgctgggtgaagtagtcaatgatcataggatcaagcggccaaatgggtaagttagtttcttgagctaattgccaaactttttgcatttgtttttcaagcaaatccttactattaaattgtggattaataaaaaaatggttcattatccagacattactgtctttgcgagcgattttatctaaggtaacgctagataatagtatgtcttcttcattttttatagtgaaaatttggtgcgcatcttgcttattcataaaaaattcctttttaaaaaaataatctcatttttttgcgtaataaataatagagagctatttattttgtgttgactaaaaacattgtaaaatagataactgtcaaaataaaagataaatggagctttggaatgaaaacacgtggatttgaagtagtcaaaaagtatcaagatcaggaaattaatcttcctcgcagacagaccctagctagtgcaggctatgacatcgaagcggctgaagacattactatccctagcatttggcgactaaattttgtgcgaatttttaggttgattagaaatggacaccagctgtatgagcgcgactatgagatggcggatcagattttaaagccgttgttagtgccaactggacttaaagcttatatgccagaagatgaagtgttgattttagctaatcgttcatctaatacttttaagcgtaatctagctttgccaaatgggatcggcgttatcgatgcagattattacaataatcctaacaatgagggcgaaatttttgtacaaatgattaattatggcgtacggcccttgcacatcaagaagggagaccgtattgctcaaggcatttttatcaaatacttgaagaccgacgatgatgatccaattagtcgaaaaagagttagcggctttggatcaactaatgaaaagaagggtgattaatggctagagtaaaaacacaatataagtgtcgttcttgcggctatatttcggcaagctatttaggccgctgccctaactgtggtgcttggaatcaatttgaaaaagaaactgaagaagtgcaaaagcgttctactaaggcaactgctagtcgtttgattcagaagactggattaaatgaaccggtaaagctggataagattaaagctgaaaaagaagaacgaattgtcactaaatctgaggaattaaaccgcgttttaggtggtggtattgtgccaggctcactagttttaattggtggagatcccggaattggtaagtcaaccttgatgttacaaattatgagtgacttatctgaaaaatataaggtgctttacgtttcgggagaagaatcagctaaccaaatcaaattgcgggctgaccgactgggtgtaggtcaaagtaatatgctcttatatccagagactgacatgcatgatattcgcgaacaaatcaatgatgttaagcctgactttgttgtaatcgactccattcaaactatgaatgaaccaagtcttgattcgatgactggctctgcctcacaggttcgtgaagtaacaagtgaattaatgaaaattgccaagatggatgccattacagtttttgttatcggccacgttacaaaagagggtgcgattgctgggcctaagatcttggaacatatggtggataccgttctctattttgaaggggatgaacaccattcttaccgaattttgcattctgttaaaaaccgttttggagcagcaaacgaaattggaatgtttgaaatggttaatgaaggcttaagagaggtaactaatccatcatcaatttttctggaccaaagattacctaattctactggctctgctgtggtggtatcgcttgaaggaactaggccacttttagcagaaattcaggctttggttactccgacagcttttggctatgctaaaaggaccacgtcaggtattagttttaacaaagcttcattgctgctagcggtgcttgaaaagcggggaaacttaatgttgcagaatcaagatgtctatttgactgcaactggtgggattaaattgaatgaaccagcaattgatttagcaattgccatggcagttgcatccagttataccgataaagaaatttcgccgacagattgttttgtaggcgaagtgggcttaactggtgaagttcgccgagttgataaaatcgatgcacgagtaaaagaagcggctaaagtagggtttaagcggatctttattccacggcataatatgtattctggattaaaagatcatggcattgaggtaattcccgtttcgagtattccccaagctttaaaattagtttttggctagcattaattgaattcttactatataacgagtaaactaagattgtttgaatttactattttttgaaagaggcatgaattttggctaaagaaaaaatccgtgtaagatatgcaccaagtccaactggtcacttgcacattggtaacgcacgtactgcactttttaactatttattcgctcgtcataacaagggtacgatggtcttgagaattgaagacaccgaccaaaagcgtaatgttaagggcggttctaagtctcaaatggaaaaccttcactggttaggaattgactgggatgaaggtcctgataagggtggcgactatggtccttatcgtcaatcagaaagaaaagaaatttaccaaaagtatattgatcaattgatcgatgaaggtaaagcatattactcatacaagactgaggaagaacttgaagcacaacgtgaagaacaacgtgctgcaggtgttgcacctcactatacttacgaatatgagggtatgactgctgatgaaattaagcaagctcaagatgaagcaaaggctaagggcttaaagccagttgttcgtatccacattccagaaatggaaacttattcatgggatgatattgttaagggacaccttgagtttgaatcagacactattggtggggatttcgttattcaaaagcgtgacggaatgccaacttacaactttgccgtagttatcgatgaccacttgatgaagatcactcacgtacttcgtggtgatgatcacgtttctaacacacctaagcaattagttgtttatgaggcacttggttgggaacctcctaagtttggtcatatgacattgatcattaattcagaaactggtaaaaaactttctaagcgtgacgaatcagttcttcaatttattgaacaatatcgtgatcttggttacttaccagaagctatgtttaacttcattactcttcttggttggtcaccaaagggtgaaaacgaaatctttaacaagcgtgaattcatcaagcaatttgaccctgcacgtttgtctaagtcacctgctgcttttgaccaaaagaaacttgaatggattaacaaccaatacatcaagaaggctgatcgcgacactttgcttgatttagctttgaacaacttgcaagaagcaagtcttgttgatgagcatccaacaccagaaaagatggaatgggttcgtcaattggttaacatctactcagtacaaatgtcatacactaagcaaattgtagacatggctaagattttctttgaagaagctaaggatctttcagacgaagaaatcgaagaaatcaagaatgatgatggccgtggtgtaattgaagaattcaagaagcaattagacctcatcccaagatttacttcagttcaaatcatgaacgctattcaagcaactcgtaaggctactggcatcaagggaagaaagctctttatgccaattagaattgctaccacgcgttcaatggttggacctggtattggcgaagcaatggagcttttaggtaaagaacgtgtattagaacacattgatttaaccttgaagcaaatgagtgctaataatctttaattagataaattgaaaaagaggctgcaaataaatgcagcttcttttttcatctgctaaaataaaaattagttattttgacagaagggacaagtgttagccgtgagagtttataatacactgacgcgtaaaaaagaagaatttaagccattagttccaggacatatcagcatgtatgtctgtggaccaacggtgtataactatattcacattggtaatgccagaagcgcaattgcttttgacaccattagacgctattttgaatataagggttatgacgttaagtatgtttctaactttactgatgttgatgacaagatgatcaacgaagcgagagctgaaaaaacgactgtacccaaattggctgaaaattttatcaatgcttttttggctgatacgacagcgctaaacattgagccggcgactttgcatccccgtgcaactcatgaaattaatgacattatcacttttgttaaaagcctaattgacaatggctatgcttatgaagtagacggcgatgtttattatcgtgccaaaaagtttaagcattacggtcagttaagtgatcaaaatattgaacagcttgaagagggtgcttcagagcacattaacgatacagaacaaagccgcaaagaagatccaatcgattttgctttgtggaaggcgcaaaaggaacccgatgaaattgcttgggattcaccatggggcaagggacggccaggctggcatattgaatgttctgtcatgagtaccaaatatttaggcgatacgatcgatattcatggtggtggtcaagaccttgaatttccgcaccatgagaatgaaattgcacaaagtgaagctaagaccgggaaaaagtttgttaattattggctgcataacggttttgtaactgtcggtaaagatcaggaaaagatgtctaaatcactgcacaatttcgtaacagtgcacgatattttaagggaagttgatccgcaagtactgcgcttcttcatggctagcgtacaatatcgccgccaaattaactattctgctgaaaatttagcacaagcagctacaattttagatcgctttaaaaatactttgactaatattaattaccgtctagaagatgatacagctagtgaagaatcagccgaattagcacaggcgattatggcaactaacgaaaaatttgaacaggcgatggacgatgactttaatgtccaaaatgctttaacagctatctatgatttgttgcctgtagttaatgccaacgctaatgctgctagagctgacaagcaagaattgcaaaagtttaaagagaaattagctagttggttattagtgtttggcgtggatactaataagctttgcgttaaaaatgctggctccaatgacgatgaaattgacgctttagttaaaaagcgtgatgaggctcgagcaaataaagattgggcaactagtgatcaaattcgtgatcaattaaaggaaatggggatcactattcaagataccccacaaggaactaggtggactcgtgactaaaataaaaaaactaacggaagaggatgttaatccggatactttaaatggacaaactttagcctatttaggggatgcagtgtatgaattaattattcgcagacacctagttaaaggcggtatcgttaaaccacaagtattgcagcgtgaagcgactcactatgtttcagctaaagcacaagctgcgttggtaactaagatgcaagatgaagaaatgttaacggatgatgaattagctgcttttcgtcgtggacgtaatgctaaaagtcatactaaggctaagaatactagtttgaaaacataccaattatcaacaggctttgaagcaatgattggttatcttgatttactggggaaaaatgatcgagtggcagacttaagcaagtggtgtattgatactgtagaagaggacgggctgaaaaattatgacttcaaataaagattttgtctttggacgccatgctggacttgattatttaaaaacacaaagtgccgacaagattaataaggtttttttacaacacggtgtacaagaagaatttgctaatcaagtttatagtttagctaaaaaaaagcgtttagttgttcaagacgtgcctaaaaataagcttgatcgtttggttgctggtggcaatcatcaaggtctagttttagcaatttctagctttgaatatgcagatttaaatcaattgctggacaagtatgatgcggaaggtaaagaaccatttttattaatgttggattctattgaagaccctcacaatctgggatcaattttgcgttcagccgatgctactggcgttgacgggatcattattcctaagcgtcacgcgactggcttaacttcggtagtagctaaaacatctacaggagcaattgattatgtgccagtagcgcgcgttaataatttagttcaaactactaaagaactgaagaaacgcggttactgggtctttggaactgatatggcaggtactgattatcgtgaatggaatgcccaaggcaagactgtactcgtaattggtaacgaaggtaaaggcatcgccccattacttaaaaagcagatggatcaaactattactttgccaatggttggtcacgtacaatccttaaatgctagtgtggcaaccggggtattgctttatcaagcttataacagtagaaatccattagtaaaataaacagaaagtagacaaaagtgtgagttttgtctacttttttagatacataaagctcatttctgtccattaaacatgtgttttcttctcaaactcaggggatagtctgtattctttgaggtggaggataaattgaatgattaatgaagagaagctgattaagaaagtacgggcaggagatgaccaagctttagaaaaattgtttcatttatatgagccgttagtaaattcaatcgtgaagcaattctatttgcatcattatgatcgtaaagactgggatcaagaggcaatgattgtttgttatgaagcagcactagttttctcgcctaaaaaggggaaatttagcagtttatataaaactaaattgtttaatcatgcacggaccttggtacgttacaatatggcacgtcgcaggcaaatctatagtcaatcgattccgctagaaaaggcggacattcaaggaagcgtgaatgaaccatgccgctctgaattatcgattccagttgatgagacttacaataattttgttaatagcttgtcacacgttgaattaattgcattattaaccataattggcgagataagtacagagtatgcgattgatcatctaaatattgaagcaatgaagctggtcagagctcgagcacgaactttacagaaaatgcggaaagtgcttttttgatagctgatcaaaagaaagtgcggtataataagtaatgtagaatattttaggaggtaatttaagatggcagacgaaattattaagactgcattgttagaccgtcacatgaaggaagcttttgactggagtgattcagatatgccagttagagatgccctttgggactactttatggaaaagaatggtagagataccatgaagacggaagaagatatgcttccatttttgaaagactcagacgataaaatcgaagccttcgttaacgaaaatcttaagaagtaaatccgactaaaaaacaatgttctacgcaccgtggtcacgcatagttttgaccactaagacagctaccttctccggtggctgtttttttatactaaaattaagaaagaattttaaagatgaaatatataattggcatagacataggaactactgcgactaaaggtgtgttgtatggcgaagatggaagtgaagtagctaaattggcaatttcctatccattgattcaggaagaagcgggacaggctgaagaagatccacagcttatttttgacgcggtacagaaaatgatttatcaattaagtcagaaagcatctggtcaaattttggcaatttcttggtctagtcagatgcacagcttaattggcttaggtgaaaataatgagttactgacaaacagcattacttgggcagataatcgtagtagtgatgtagtgcagcgggcaaaaaagtcgggctgggcaagaatgatttatcagcaaacggggatgccgccacatccgatggcgccagtgtataaattgctgtggcttaaagaagaacagccaacactttttgcacaagtaaaaaaatggattagtatcaaagaatatattatttggggcttaactggaaaaatattaactgatacaactatggctgctggcagtggaatgatgaatttaaaaacgctgacctgggatgaaaagatattggctcagattgggctagatcaagttcaattgccgacaattgctgatcaacaatctactgtgggtaaaattattccagaatatcgtgctaaattgggtttaaatgatgaaactcaaatcgttttgggcgcaagcgatgggtatttgtcaacgattggtgtcggcgttttggatgagaaagattttgcattgaatgttggcacttctggtgcggttagagtaattgcaccgaaggcaattgttgatcaaaagaatcgctttttctgttaccctgttgacgccaaacattatttgcttggcggccctgtaaataatggtggaattgtgttcgattgggccagaaaaacaatttttggcccagatgaaacggcagaggacgtcttaaatgtggcacaaactgctccggctggaagtaatggattgttgtttcatccttatcttggtggtgaacgagctccaatttggaatgctcaagcacgtggatcttttgttggcttgacgcgaaatcacactaaaccgcagatggctagaagtgttttggagggaattgtttttaacttgcttggcgcctctcaaggattgcttgatcaagtgggacagcctcaagctttacgtgttactggtggctttgtgcaaagtgattttgttagacaattaatcgcggacatttttaacttaccagtgattgtaattaaaaatgagcagtgtggtaccctagcagctatgtttttagctaaaactgcattagaagataagccagacctggaaaagattaaaaagcgtactgccgaaagccaagtttattttccaaatccccaaaatgtagcgatttatcaagaattgattctcgtttatcgaaaaattgagcatgaacttgaagcctcttatgaagatttggctcagtttcaagataagcatccacagaaatttgagtaaaacaaaaaagacgcattgcgtctttttttcatagattgattaactattaagcattttcaatatcttcaacaatctgatcaactgtcatacgattgtctttcaaaatttctttcaaaggtacttgatcagtatagacacgtttttggccgtagttgagtactttaatatccttgtcgccaaggtaggaagctactttttcaccaaaaccgccgtccaaaatattgtcttcaatagtaacaataactttgttttcttgagtcaatttgtctaaagcggcagtgtctaaaatattagcagaaactggatttactaagctagcacctgtcttttcagccacctttttacctagcatatcgtacatatcacctaacgctaaaacagcaacatctttacctggtttaatgtcgtacttgatttctgaatagtcaacagcagtaatttctttaccttcaggaacatctttggtaggcatcttaattgctacaggatgcttcttttgcttaatagcccattccatcattgccttttcttcggctaagttagttggagcaaggtagatccagttaggcaagttagaaatcattacttgatcaaacacacctaggtgagtcttacttgtgccagaaatgccaccaccagcaaccatcattacaactggtaaatcattagcggcaacatcgtgtgataattgatcaaatgcacgttgcaagaaggttgaattttcaaataaaactggagttgcaccttccttagccattccggcagcgaaggcaacggattcttgttcagcaattcctacatcatggtagttttcaggatatttgtttttaattctgtctaagccgaaaacgccgggaattgcggcattgatagccatgatcttctcaccattattgatgtgatcttcaagaacatcgagtgcaatagagctagcggtcggaccttcaggcattgctactgtcgtcttgtcagtctttaaatcgaatggcattacccagtggtgtgcttcttcgttgtcgattgcaggttgataacctttgcccttgagagtgttgatatgaagcaaaatagggtgatcaacatttttaactgctttaaaagcatcgatcattgattggatatcattaccatctgcgacataacggtaatcaaagcctattgcagtaaatggattttctttggtttcaccattagaatcacgtagtttctttaaagcagtaactaagccaccgacgttatcatcaattgacatttgattgtcgtttaccactacaactaagttatgcttttcaattgcagcgttgtttagcccttcataagcaaggccaccggtcattgaaccatcaccaattaaggccatgatgttttcatgtttgcccattaaatcgcgtgctttagccatcccagttgctaaggcaattgaggtagatgtgtgaccgacggcgtaatagtcatatgggctttcatcagggttgctatatggagttacatcttcatagtggtctggatcaagccaagcgagtgcacgtccagttaacattttgtgcgggtaagtttggtgggaaacatcccagacaatcttgtcctttggtgcatcaaaaacatagtgataagcaattgtagcttcaacgattcctaagtcgggacctaggtgaccaccttcagcggcatctttttctaagattagagtcctaatttcactggctaacttttccatttctggaagagataatttttttaaatcagcaggaccagaaattttattcaatagatattcaggatgtttatttattattatgtcctttctaacaagtagttacacttattatagataagcaaaaatcaaaataaaaatatttagttgtaattgagctcgattacttttagtaatgtaaatcagattattgacgtaggaagggacaacagtataaaatactgagtaagtatgtgtttttataaaagtttggaagtgagattatggcagtgaaaaaagcagccttagcctgcagtgtttgtgggtcacgcaactactcaatcaccgcaagtaagaatcgcactcagcgacttgaacttcaaaagttttgcaaacattgcggtaagaaaacattgcataaggaaacgaggtaaataaagctaatgattaagttttttaagagtgttggtcatgaaatgaaattggttaaatggccatccgcaaagcaaaatagacgtgatacagcaactgttattactagttcaattttatttgcggcatatttaggtgcacttgactggctcttcacttggttgactcaaagattaatgtaattgctagcataattagaaattatcagcgattcatgctataatattgacagctaaaagaaaacctctgtgggaggtttttttgtttacctaaaatttaaggagaaaaatatggtcgaaacaacacaaaagaaatggtacgttttgcatacttattcaggctatgaagacaaggttaagtcagacttgttgtcacgtgcacaaagcatggggatgcaagactacattttccgtgtaatggttccagaagaagaaaaagtagaaaccgttcgcggcaagaaacaagaaattgaagaaaagattttcccaggatatgttttagttgaaatggtaatgactgatgaaagttggttcatcgttagaaacacacctaatgtaactgggttcgttggctcacacggtggtggctctaagccatcaccacttcttgatgaagaagtaacgcgtttgcttaagaatcaaggtcaacctgctaagaaaccagtagttaactttgatattggcgaatcagtaactattactgaaggtgcatttaatggcatggtaggtaagattactgatattcaaccagataagtacaaattatacgtatcagttgacatgtttggtcgtgcgactactgctgaacttgattatgatcaagttaagaagcttgacgaaaacgaataatatttagaatttttagttgtaattgtacccaaacgatgttattctaatacggtacgtttattattgtgggaggagaaaaaaggaaaattctccattttaaccgcatcacggaatcaaggaggttttgaccgtggcaaagaaagttattaacgtagttaagttacaaatcccagctggcgctgctaccccagcacctccagttggtcctgcattgggtcaagctggtattaacattgttggttttactaaggacttcaatgctagaaccgctgaccaaaagggcatgattatccctgtagttattactgtatatgaagatcgttcattcgaattcattactaagactccaccagcaccagttcttttaaagcaagctgctaagatccaaaaggcttctggtgaacctaataccaagaaggttggtaaggtaaccaaggaccaagttaaggaaattgccgagactaagatgaaagaccttaacgctgctgatattgaagctgctatgcgcatggttgaaggtaccgctagaagtatgggtatcgaagtcgaagactaatcctgttatttaggtaacaaattaggtgggagagttaagagaagctcgtttgaccacatatacaaggaggaaatcacatgccaaagcatggtaagaaatatttagatgctgccaagaaggtagactcaaataaattatactcagtagcagaagctatgaaacttgttaaggaaacttcatacgcaaactttgatgctactgttgatgtagcttacaacttaagcgtagatcctaagcaagctgaccaacaaattcgtggttctatcgttttaccaaatggtaccggtaagacccaaaccgttgtagtatttgctgaaggcccacaagctgatcaagctaaggctgcaggtgctgactttgttggctcagatgacttggtagaaaagatccaaggcggctggttagactttgacgttgtagtagctactccaatgatgatggctaaggtaggtcgtttaggtcgtattcttggacctaagggcttaatgcctaaccctaagactggtactgttaccatggatatcgaaaaggctgttaagaatgttaaggctggtcaagttgaataccgtgttgaccgccaagcagctattcacactcctattggtaaggtatcattcactgaagaccaattagttgaaaactttgacgcattacgcgacgttatcttacgtgctcgtccagcttcagctaagggtcaatacattaagagtgttgctgtttcagcaacctttggcccagggatcaagcttgatccattaaacttggactaatttaaaatagactattaaaagcctcgctattgcgaggcttttttctattcattgacctattattttcgaacatggtatcataaattgaacttacaaatctatatattaaggataatgtcatgaaaaagcattctattggaaaactagtcattatgttggtgctaatgctagcttttgttacgggctgtgctaataatggttctaaaatcactattgttggttcaagtgcaatgcagcttttagcagaacaagcaggtaatgattatcgcttaagtcatcaagacagcaacattgtcgtgcagggtggaggatcaggtacaggattgagccaggttcaagctggtgcagtccagattggaacctctgatgtttttgccgaaacacaaaagggaattgatgccaagaaacttcgtgattataaaattgcagtagttggtattgttccaattgttaataagggtgtaggtgtgaaaaatgtttcgcaaaagcaattgaaacagatcttcactggtaaattaacgaattggaagcaactaggtggcaaaaatgaagccataactgtgatcaatcgttctaagggaagtggtactagatctgctttcgaagatataattttacaaggaacaaaaccagttaagtcgcaagaacaggactctaacggtgccgttaaaaagattgttaattcaacgcctggtacgattagttacttgtcctttccttatgctcatgataccaatattcaaaagttgagtattaatggggtaaagccaactaacaaaaatattactactaataagtggaatatttggtgttatgagcacatgtacactaagggtaagcccaacaaacaaactaaagcgtttattaattatatgttaggtgaaaaagtacaaaaagatcttgtacctaagattgggtacctcagtatcaatgaaatgaaagtaactcgtaatagcaagaatcaagttacacaaataggaaaatagttcatggataagaaggataaattaaaggaagttgttgatcaagcaattgctagtcaacacgttccacacgttaaattaaaaaagatgggtccgactagtgttgatattgataaattaaccaagccatctaaagagactcatcaagaatattggggcaagggtttaacttacttggcaattgttttgattattgtcttagttgtctcaattatcggctttgtcggctatcacggcttggctacttttgtcagcgatcatgttaatgtcattcactttttgacttcaactgattgggacccgggtgagggcaagaatcatgttggtgctgcggtaatgatcgttacttcgttcttagtaactcttttagcagcattggtagccaccccgtttgcaattgcaatagctctttatatgactgaatattcatctaaaaagggtgccaatttcttacagtcagtgactgaattattagttggaattccgtctgtagtttatggtttcttgggattaactatcatcgtgcctgtgattagaaaactatttggtggaacaggttttggtattttagcagctacgttggtgttgttcgttatggttttaccaacaatcacatcattaacggttgatagcttaaaggctgtaccaagtcattttagaaaagcttcaatggccttaggttctacgcattggcagactatttatcatgttgttttgcgagttgctacgcctagaattttgacggcggtaatcttcggaatggcaagggccttcggtgaagctttagccgtacaaatggttatcggtaatgccgtcttgatgccatacaatttggtcagtccatcagcaacattaactagccaattaactagtcaaatgggaaatacggtcatgggaactttgccaaacaatgcattatggtcattagcattattgcttttaattatgtctttggtatttaatttcctagttaagttaattggaaagaagggacaaaagtaatatggatgcaaaaaagaaagataaattagctacggcgattatctatattttggtaggaattgttgtattaattttggccggtatcctaggtgatatcttgattacaggtattccacatttgtcctggcgctttttgagttctgaagcctcatcataccaagctggtggtggggtacgtgatcaacttttcaattcaatttatttgttaattttgactactattatctccttaccaattgctttaggagcagcaatttatctagcagaatatgctaaagataattgggtgaccaatttgattagaactacaattcaaattcttagttcattaccatcaattgtagttggcttattgggttatttattgtttgtagttcaatttggctttggtttttcaattatttctggtgctttagctttgaccttttttaatttgccaattttaactagcaatattgaagaagcaatcaagggcgtcccacaagatcaacgtgaagcaggattggctttaggattatctaattggaaaactattcgcgggattgttttacccgctgctcttcccggaattttaactggaattattttgagtgcgggccgaatcttcggggaagctgccgctttgatctatacagcgggacaaagtggatcaacagtcaattatgcggactggaatccatttagtccaactagtccacttaatgtaatgcggccagccgaaacattggcggtccacatttggaaagtaaatactgaaggaattattcctgatgccacgattgtttcagcagctacttcagcgctcttggttattgtggtaatcgtatttaatttaggtgcacgttatttaggcaataaattgtaccgcaagttaactgcagctaagtaggtgaaataatgcaagatttaaaacctagctatattaaaacttttgcaaatgatgatttggaattatcaactgaagatttaagtgttctttatggcggtaaggtacaaaaattatttgatgccagtcttcaatttaaaaagaacacgattacagctttgatcggtgcttcgggttcaggtaaatcaacatttttacgttcattaaatcgaatgaatgatcgagtagcaactgttaacggaaaaatctggtttcatggtttagatgtgaataagcctaatatcaatgtttatgaattaagaaaaaacattggcatggtttttcagcggcctaatccatttcctaaatcaattagagaaaatattgtttatgctttgaaggcagatggacataaggatcgggcagaacttgatcgagttgtagaagaaagtttgcgtgcggctgctttatgggatgaagttaaagataagctggataaaagtgcattagcattgtcgggtggtcaacaacagcgtttatgcattgctcgtgctttagctgttaagccagaaattttactactggacgaacctgccagcgctttggatcctgtttctacttctaaactggaagatacccttaagcagttgaggagtaagtatactatgattatggtaactcacaacatgcagcaagcctcaagaattagtgattatactgcattcttccatttaggacatgcaattgaatataattcaacggcagagatctttactaatcctaagggtaagattactgaaaactatattcagggaagttttggataaaatgacaacaataatttcagcaaaagatgtacatctaagttatggcaattatgaagcactgcacgggatcagtcttgattttaagaaaaaagaattaacagctttgatcggtccaagtggttgtggtaaatctacttttttacgctgtcttaatcgaatgaacgatgacatcgaaaacattaatatcacaggtgaaatcaagtttgaaggccaagatatctataattctaaaatggatttggtcagtctacgtaaagaagtcggcatggtttttcaacagccaaccccattcccgttttccgtatatgacaatgtggcttatggcttaaaaattgctggtgttaaagacaaagagctaattgatcagcgggtagaagagagtcttaagcaagctgctatttggaaagaaacaaaggacaatttaactagaaacgctcaagcattttcaggaggacagcagcaaagaatttgtattgctcgtgcgttggctgttagacctaaagttgttttattagatgagcccacaagtgcgcttgacccaatttcaagtagtgagattgaagagacactgatggaactaaagcatcagtatacttttattatggtgactcacaatttgcagcaagcaggacgaatttctgatcagaccgcctttttgatgaatggcgatttgattgaagctggtccaactgaagaaatgtttattgcacctaagaaacaaatcacaagtgattatcttaacggtcgttttggttaaaattttgaggtaaaaagatgcacgaaatatttttggatgaactgaaaaaattaaatacacaatttatggaaatgggtgtcctcgtcaacgatgatattgaccatgctacccgtgcttttgttgatcatgataaaaagactgcgcagtcaatggttgatgatgaagaaaagattcctacagaatcaattaatattcaaaagcaagccttaaaattaatggccttgcagcaaccggtagctactgattttagagttgttatcagtattttaaaggccactactgacttggagcgaattggtgaaaatgctatgagtattgctctggaaacaatcagagtaaaaggtaatcctcgtattccagaagttgaagaaattatttctaatatgacacataatgtgcgacatatgttaattcaagttttaactgcttacgtgcaagatgatgaaaaaatggcacgtgaagtggctagtcgtgatagcatgattgaccacgactatgtaagagctcgtcaattgatcgttgatggaattgaagatgatccttcgcgtgcaatggcttcatcaagctattttgtagttacccgtttacttgaacgaatcggtgaccacattgttaacttggctagctgggtggtttataaaactacgggtgaactagaagaactatctaattcaactgaaagtgaaacgatttaaataaagtaccgtaaaaagcggtgctttttttgtaataaaaaacagttgatacgcgtggtgctagttaaatcgttctagacaatatgccatattataagctaaaatagctatttctagccgctgttgaaagcctactggacttcttgctcgattattctcagcgttgtaataactaagcaaagaaaagtcgctttcaatgctttttctaattgccatcatcgcttactattgcgtggaccttgaagccataataatagactttcttggttgctttataaccaatatcagctacgccccgaaagatcttgacacgataattgcaaacaggctggcaaactggcactgggaaactatcaataatcaaaaattctccagctgtctttacttcttgattccaagcctgacggatacaacgaattagaggcaagagcattcgagctcgacggttaaaacgagaatgagataagccaacgaagaatttacagaatcttcgttgagattcaattccaatttcagtttgccaaatgagcatcgctaagatagaactatcaggaagcttggtctgatcaacatttttacgatgtttaagtccatcaggcgcataaagcttatatagcgagcgacaaatcacatttaaccgattaaaactaacttgtaaatggtgagaaaaacgcttaagcttgagatagttcaattagatcagactcttttctatttaaattacctacaacttttattaactaaaacgatttaactagcaccacgcgtataattaatgaatatttcaaaaactgtattggcgttataccaaacaattattggtgaaaaacagaaacgcttaatcaagacagtagatgcttatttggacattaactacggtgataaagtttatcagataattgatcaagttaaggaacgtaatattccaattttgtcttttggggatatagcagatcaaaacaatacttactcaaactacactgtttttggcaatgatcaagttgacgagatggtggataaaattaatgaaatcatcaataaccaaaataaataaaattatcttttgcattttacagcaaagcttgctataataattaactgtaaattctacctaagactcgggtggcatgacgcctcaaaatcccgccgaggccagaagatgatgaagatttttatgctccatgtctttcggcatggagtttttgcttttttaaggccttatagaatttatcaatgtgatcatggaggtgaaataatttgagtaaagctgctattgctgaaaaagaaaagttcgttgatgcatttgctgaagaacttaaagctgctaaggcaatcttggtaattaactaccttggtttgactgttgaagaagttactaacatgcgtaaggaacttcgtgataacgatgttaagatgaaggttatcaagaacacctacttaagacgtgctgctgctaaggctggtatcgaaggtcttgatgatacttttgttggaccaactgctgttatctacactgataacgctgatgacgttactgaacctgcacgtatcgtttctaagtacgaagatgactttgacgttatcgaaattaagggtggtatgcttgaaggtaagttgacttctaaggatgaaatcaaggaacttgctgctatcccaggccgcgaaggtttgctttcaatgcttgtttctgtattacaagctcctgtacgcgactttgcatatgctgttaaggctgttgctgaatctaaggatgaagactcagctgaataataaagaaatttatatttaatatctaaattctaatttttcggaggatacttaaatggctttagatactgataagattattgaagaattgaagggtgctaccatccttgaattgaacgaccttgtaaaggctattgaagacgaatttgacgttactgctgctgctccagttgctgctgcaggtgctgcagacgcaggtgctgctaagtcagaattcgacgttgaattgactgaagcaggtcaagaaaaggttaaggttattaaggcagttcgtgacattactggtcttggccttaaggactcaaaggaccttgttgatggtgctcctaagaacgttaaggaaggcgtttcagaagacgaagctaacgacatcaaggctaagcttgaagaagttggtgctactgtaacccttaaatagttacagcccaactgggcaactatgaataagctctttgctatgtgcgaagagcttatttttttgtataattaaatttatgatgaaagatatagaaagaagactaacgccatatcaatgggtaatggccattttagctattatttcgatttttttgattattttagattttgctgcggttattaatattgatgaaccgactagtaaatggttctggatcaatagtgcaattgtagtatattttgcaattgattattttcgtggcttacatgcagcagaagacaagaaactatatttcaaaactcacatttatgacttgctgagtattattccaatggggttattgtttatcagcttaaatatttttaatttatctgggctggtatcagatttgcggcatttgcgtttgattcgattagctggtttgatgggaaaattacgtaatatttttcatactaatggcctactctatgtaatcttttttacaattacatttttgttggtaggagcggaagcattcgcaatcactgaacatgtaacgctggatactgctttttggtgggtcatttcaacagcttctactgtcggttatgatgcaatttttggcaaaacaattccaccgcatagtattgtaggaaaattcgttacattagtaatgatgcttttaggaattggaatagttggtatgttaacgtcatcgattacttcgtatttgatgaggagaacgaatggcgcgaatacgttaaaaacgcatgataatattcaattaattttgaaaaagcttgataatttagaaaagcaaaacaaggatttggctgatcaaaacaaaaagatgcaagcacagattaatgaattgaaagatgtacagaatacaacggagctgcataagataaaagaatggtttgagaaaaagaaaggttagttaaaatgagtgaagaaaaaaatcaaatgtattttgcgactgatcctactgccaagcatgatcaacatgttgttgattatcatgtggataatattgatttgaaattcacaacagacgcaggtgtcttttctaaaatgagggttgattatggctcaggcgtattgatcaaggcaatgaaagatgttgtttttcctaaggataatatcttggatgttggtaccggttatggtccgattggtttatttgcggctaagttttggcctgatcaaactgtagatatggttgatgtaaatgagcgtggattaagcttggcaaagcagaatgcacaagttaatcacatagataatgtaaatatctattcctctgattgttatgaacatgtggataatgataaaaagtttggtctaatattaacaaatccgcctattagagcaggaaaaaaagtggttaatgagattttactgggagcaaatgagcatttggttaatggcggtatcttattagtagttattcagaaaaagcagggagaacctagtgcgcgtaagctgatgaccaatacatatggtaattgtgaaattttaacaagagataaaggctattatatcttaaaatcaactaagaaataactaaataaaaaatgcttgaaagtactattaaataagcattagactttataaaagtgctttcaaaactggatttatcctcgtataataatcttgtaaatatcaagagtatgtgaagaggataattattatgaaaaaggcttggaaatacattgttgcagtattgattgtaattgttggtgtgtttatgttaggtatgatttccggtgataacgagactgctgctccagctggaattgctgcattatacttgatcttgtcaggaatctttttctaccacaactttagaaatcgtaacattgaaccattgtaaaaagtaagcagctagtcgcaaatagctgcttttttgatacaataaataaaaacgatgaattgagaagtgataaaatgctgtctggcgaagataaaaggaaatacatgcaattagccattgaccaggcaaaagaagctgaaaagcaaggagaggtgccgataggggcagttgttgttgatcctgatggccgcgtagttggtactggatataacaggcgtgaacttgatgaagatgctacccaacatgcagaaatgattgcgattaaagaagcttgcagtaagttaggcatgtggcgcttaattgactgcagcttattcgtgactttggaaccatgcccgatgtgtgcaggggcaattattaattctagaataaaagacgtttatttcggtgcacttgatccaaaagccggagcttgtggatcagttgtggatttatttagcgtagaaaaatttaatcatcatccgcatgcaattcgtggactgtatcgtgatcaatgtgcacaaatgctaaaagattttttcagagcgattcgtgagaaacaaaaagcagctaaattagctcaaaaagaagtataaaatcagtaatttttaaaacaagatgctggtaatatttactgaaatacgttaacatagttgttgggcaatgtttgacctctgaattgtgtcaggaccggaaggtagcagcactaaggttgttcaggcatgtgccttttttgttagaatattaacagctcttagctcttcgagagctaggagcttttttacttaggaaagagaatttatggcttatcaagcgctatatcgtaagtggcggccgcggacttttgacagtgtgattggtcaagaagcgattaccgataccttaaaaaatgcgattaaacgtggtaaggtttcccatgcgtttcttttcgcaggaccccgcggaactggtaaaacatcttgtgctaagatttttgctaaggcattgaattgtactaatttgcaagatggcgaaccatgcaatgagtgtgctaactgtattgcagctgatcaaggttcaatgccagatatcatggaaattgatgccgcttcaaataatggggttgatgaaattcgtgaaattcgcgataaggtaaaatatgctccaacggaaggtaaatacaaggtatatatcatcgacgaagttcatatgttgtcgatgggagcttttaatgctttgctgaagacattagaagagccaccagagcatgtagtatttattttagcaacgactgaattgcaaaaagtgcctgcgacaattatttctagaacgcagcgctataattttaagcgaatttccaaagaagaccttgagaagagaatgaaatacattcttgatcaagaaaatattaaatatgaagataaagctttagcagtcattgctcaagtagccgatggtgggatgcgggatgctcttagcattttggatcaactgttgagttacgagaaggaaagcgtcaactatgatgatgctttgcagattacaggctttgcagatcgagaaaatattgaaaaaattcttttagctttgttaaatcaggatgcaggtcaagccttgcagtttacacaagatgagttggctaaaggagctagttcaaaaaacattttagatgaaatcatcgatctaactactaagagtttattaatcgtcaaaaccgatgaaaataaacaggaaacttttttaacaaaagactttattgaaaaaataaagagcgtttctacagatagttattatcgattgattaatttggctaataatgccttgaatgatttacgctatactaatcagcaacagataccactggaagtgttcttagtagaagcaagtagtactgcaccagtgcagacaagcgctgccccagctaagacaacaccagctcaacctgcacaaggtaatactgatttgcaggctgaactagcagcgctgaagaagcaagtcgttgatttaacacaaaaacttagtgaagtatccaataagccaagtttatcaacaaatcaggtatttcacttggatactgcggtacctaaagtggctcctaagcctgctgttaaaccaaaagagaagcaaactaaaaagccggttagaaaagtcaaaaaaactacggcagaaaatcgcaaacaagtatatcatgttcttgaaaatgctactcgaaacgatttagagacaattaagaatgtctggcctgatttacaatctgttttagctgtctctgaaaaagcactgcttgatgtattagaaccagtggctgctagtcctaaacaagttgtcatgaaatgcaaatatactttatggtttgaaaatgcgagcgcagataatgatctgttagggcgcttaacagactatattgaaaagtttgctaaacattcttacggcattgttttggtgccagataacgattggctggcagttagaaaagaatttgttgaaagccataaggatgagctacttgctaagaaaaagcaacagattgagattcaagaaaaaaagtcagatgaaccagaagttgatccagaagtgattaataaggcaaaggatctttttggggatgcagtcaatattaaagactaaagtactatgagcaatgattataatattaaagttttaaataaagaaacaacattacagatcttactagaagatcataattctttgattcgttttggagatggagaattagatttaattagaggagcaagtattccgtatcaagattatcaaccggaattagctggttcgctaaaagagctcctgttagaaggcagcaatcgccgtttattagtaggattatctgatgtttttgaaaagttagatcgctataatgattattgccgtaatttttatcaaaatagtttcttcccgaataatcatgacttgttaagagaagttgaattgcaatacaatgtatacgtttctactttcttttcacggccatatattgatttagtagataaaagtcacgctaaagattattttgctaaaatgaaacagctttggcaggatcatgatcttttaattgtagaaggtaaatatagtcgctcaggcgaaggcatgacttgttttctaatgctagatcaattagtagactcatttgtccgccaactaatgcatatagtcgcaaaaaagttattgaagatgaaattattaaaaatgcagctaataggttgattttactgatgttaggtcctactgcaaaagtgattgtggctgatttgatagctcagcttaataatcaaatgattgatatagggcacatcgattcagaatatgaatggatgaaaatgggcgtaactaataaggtgaagataccgcataagcatactgctgagtttaattttgatgataaacaagttaaactagagaaagacgacaattttgataagcagattattagtataatagaataataaaggagaaaaattatgagtagaagacctaattttggtggtatgggcatgggcggcatgaacatgcaacaaatgatgaagcaagctaagaagttgcaagcacaaatggcagaagagcaggaaaacattactgctcaagaatttactggtaagtctgccgatgatttagtagtagctacctttactggtgaccgcaagttgaaggacatcaagattgataaggaagcaattgatccagacgacccagatatgttacaagatttggtaattgatgcggttaacaagggcttgaccaaaattgatgaggcaactcaggcaagcttaggtaaatacacgaaaggtttgatgtaattgcaatatccattaccaattgctcatttaattgatgcttatatgaagctacctggaatcggtgaaaaaacggcgactcggttggctttttatacgatggatatgcctgatcaggatgtcgatgattttgctaagtctttagttcaagtaaaaaaagacattcatcaatgtccgatctgtggcaatattaccgaaaaagatgtctgtgatatttgctctaatcctaatcgcgatcaaacaactattatggtagttgaacaaccaaaggatttgatggcttttgaggaaatgggcgaatatgacggactttatcacgtgcttcatggtgttctttcaccaatggatggaattggaccagaagagatcaatatcaagtctttaattacgcgtttgcaaaaaaatgatgctgttaaagaagtgattttggcgcttaattcaactccagaaggcgaatcaactgcgatgtatatcagcaaattaattaagccagctggtattaaggtaaccagattggccgctggtttgtcagttggtagtgacattgaatatgctaattccattactttaaagcgcgcagtgcaaggaagaacggcattataatggctaataaaaagcaagcaaagatcaaagcaatgggtgatcaaaagttggtagccgagattgaaaagctacaaaatcaaattgcattagagcaagatctcgatcaaacaactttagatttatccgaagataattatgtgcaaaatcgaatcttaaaggcaaagtatacttttttgtataatgaagctcgtcatcgaggcacaagatttagtggtattactaatgctattacccagtagaaaaagaccgaatattggtctttttttattttgaataaataaaaaatagtaggactgttaatctctatgaaacttctgtagaatagacatatggaggattttatgagaggttattttgttagttttgaaggccctgatggcgccgggaaaagtacagttttaaaagaagtattgaaccaaattggttcagagcttaagacacaatatcttgtgacgcgtgaaccaggcggttcaaaaattgcagaaaaaattcgcgacattattttagatcctgctaacgacaagatggacaataagaccgaagcgcttttatatgctgcatcacgtagtcagcatgtggaggagattattcgtccagctttaaaggaaggcaaagtcgtattttcagatcgctatgtcgatagttctttagcttatcaaggagcgggacgtgatttaggaattcaggaagttaagcaaattaatgattttgcaacggataaattagatcctgatcttacttttttcttagatcttgatcctgaagtagggttaaaacgaattgaaaagctgcgtccgggtcaggaagatcgtttggaacaagagaatcttgcctttcataaaaaggtttatgccggttttctcaaggtaaaagagacgtatcctgaacgcttcgtaactgttgatgctacgcagccaattgatcaggtagttgctcaagttattgcaacattaaagcaaagaatgccagagttattttaaggattgatttagatgaagttagtaattgcaattgtgcaaaaagaagactctaatgatttacaacgggcctttgttcaaaatgattttcgtgctactaagttagcaacttcaggtggttttttaagtcaaggaaatactacctttttagtaggttgtgatgacgataaagtagacgatgtattaaagattattaaggaacagtcccgagcaagagaggaaattgcaacaccacatatggtttcaactgggtatgaaattacacagcctttgaaagtgacagtcggtggtgcaacttgttttgttgttccagttgatgagtttaaacgcttctgatgattgatcttagtaatgttgggaaaaagcaaacccaatttttaaaaagagcatatgaccaaaaaaagttagctcatagttatctttttgttgatagcgatgaggcacgggcattgaatactgcatactggctagcttgtttgtttaattgtactggtgaaaataagccggatggcagctgtcaaaattgtcggcaaattttgtcaggtaaccacccagatgtattgctagtagcgcctgatggaaaacaggctctagggattgatcaaattcgtcccttaaaagaagaattagccaaaagcccagttgaaagtactcgccgtttcttctttattaatgaagcacaaaagttaactttagctgcagcaaacggtttattaaacttactagaagaaccagtagcgccagtagttacgattttgattactaacaatagtgatcagattttaccaacggtgcgttcacggacccagatcattaattttgacaatggtgagagggctagtggtaggactgcagtcttactggagaatggtttttcaaaagcagagattgaggaactgggtaatcttgataaatggaatcaggcaattaaatatttttatcaagaaatgctggaacacaacagcttagcacttgtcagtgcacataagctagctgctgatgctaagctagtgtcagagcagggttacatcttgcttcagttaaaattattggccgagcaagatttgcgtaatcctgctaaaagaataatggcggcgacaatgcttaagaatttaattgaaatagacaaaatgcgtttgagtaacgtaaatttacaaaatgcgttagattatctcgccttaaaatggaagtaggtgtttagattggatccatattcaaaactgaaaaagattgaagaaacaacagaaaatatgaccaagacgattgccagcttggaaaatgatattttagaaacattaaaagaaaacacggagttgaaggtagaaaatcaattactccatgagaagctggacaagttaacggcaaatcagcctgcacctgagactaaaacgcagagtggcttggaatcattgaagaagatttatgattcagggtaccacatttgcaatatgtactatggctcgcatcgtgatccaagtgcagattgtatgttttgtcttgatattttggacaattttggcgaaaaaaagggcaagaaaaaggacggtagataatgaaacgtcaaagcagttatgcaaaagatgaaggaaagctttatttagtgccaactccgattggtaacttggaagatattactattcgcgctaaaaaagttttaaccgatgcagattatgtagccgcagaagatacaagaactagtgggattttactggaaaaaattggggttcataataaaatgatctcttttcataagtataattccaaggagcgggcgccggaattgatcaagttgatgaaggaaggtgctgtgattgccgagattagtgacgcggggatgcccgtgatttctgacccaggttatgtattagtacaagaatgcattaagcatgatattccggttgtaccacttcctggtccaaatgctttttcaactgctttgattgcttccggttttaatcagccatttacttattatggctttttaccaagaaaatcatcggaacagaagacctattttgcacagatgcgcgataatagagcaacatcaattttttatgaagccccgcatcgtctagcaaaaaacctcaaaacattggctagtgtgctgccaaaagatcgtcaaattgtagctgcacgtgaactgaccaaaatccacgaagagtttatccggggtagtgtggaagaagttacgaattacttcaatgagaatgctccacgcggggaatttgtgattctagtttcacctaatacagaagcgcctcagcaactatcttggacagaattaattgacttagttaatgacttggttgaaaaaggtgaatccaagaaagatgcaattaaacaggtagccaagcagcatcatgtttctaagaatgaattgtatgatcaatatcaccaggattaattatgaagtataccgaagaatatcaaattgaatttaaagattgtgacgaaaatcggcgtttaaaattaccagcactagttgagttaatgatgcaggtttctgagcatcaattaagtcaaggtggtgctgggactgatgacttggttaagcgtggtctaggctgggtcgttactcaatatcattttgagattaaagacctgcctaaaccgggtgatcaagttattctaagtactgaagctagcggctataatcgtttttttgagtatcgtgattttggcgttagtacgcaagacggtaagccattagtgactgtaaaaagccagtgggtaatgctcgacttgaagaagcggcatatggtgccaaccgatactaaaatgatggaagattggggtgcaccactacttaaaaagatgccacgttttccaagattgcgtccgcaaaccgaatacgagcaaaagcgttcataccgtgcgcgttacgatgacttagatactaatcatcatgtaactaatagtcattatttcagttggtttgttgatatgttggatcgtaactttttaaaagaacatattgttacagcaattgatattaaatttgataaagaagttcattatggtgagagtataaattcttgcatggacttggttcaatatgatattattattacatctcatgcaattgaagcagaagatgggacagttaaggccgtctgtgaattaagttggcgtgagatatagtaacaacatgacgctattagttgtttttatttaggggaggaatcggtcaaatgaatacaaagaaaattttacgaacggatttacagcaactagtctttttaggtattgttgttgcaatgaaaattattctaagtcagttttcttttggtccagtaatggttaaagtgggactgggtttcattgggagtgtgctattaggatatctctttggtccgctctggggaacaattggcggtggaattagtgatttaatttcatctgcactttttggcgatcaaggtggctttttcattggttttactttaacagcaatggcaggcccatttatctacgccctgtttttatataataagccagttaaaatttggcggattattgcttctactattctggtgactgtaattgtcaatattggcatgaataccttatggctacatattatgtatggtatcaatttcaatgcggctttgatccaacgtttacctaaggagatgatcgttccttggattcaaatggttatcagctactttgttttacaagccgtttctcgtgttaaaataaaaaagtgatttaaagcgaaaagagaaaaatgtataaaatgaaaattttaagtgtttcgacagctactaatcatttgagcgtggccttgaatgatggtcaacaaattattgttgagaaaaatgaacgagatgagcgtaatcatagcgaacatcttgatccttggattgatgaaatcttaaaagataatgatttaagcttaaaagatattgatcgttttgcagttgctattgggccaggttcttatactggactaagaattggaatcactactgttaagatgtttgccagcattttagataaagaggttgtaggaatctcaactttacaagctttggctaaaggcgttcaagaagacgctttggtaattactggtttagatgcaagaaatgacaattattttgcggccggttatttaagcggtgctgtaccagagaatgtcattccagacggtcattacaatatcgacgttttaattaaggcgattcaagattatgcggccaagcatgaagttaagaaaattgtttttgtgggctcaggtcttgaaaagcaagatgaaaaatttaaagctttgaatattccatatgtttatggaactgaagaagagaatgtcatccatgctgggctaattggacaattagctgaaaatgcggttccagttgatccagataaattattgccacgttacttgcgtcgaactcaggctgaagtagactggcataaaaagacaggcaaaccattcgagccagatagtcattatgttgaagaagtttaatcaatttttccatcaacagttaaatcggattgatatgagttttaccccgtttattgcgaatgtaaacggtaagagactacaaattatgcaagctacagatgacaatattcctgacctgcttgtattagaggagcaagtttattcaggtcggacaccgtggaataagttttcatttgagcgagaactagagaagcggcataattgtctttatttggtagtgtattatgaatcgatgctagttgcatttattggtgcgcgttttactccagaagagacgcatattactaatattgcagtagcgccggcttttcaaaatatgcatattggtcgttacttaatgcaattgattattgatcgggcgcgtgaaaatgacagtgattgcgttagtctagaggtaagagtagataatgagattgcccaaaagctatatcgttccttaggttttgaaggtaccttcattcgtaaaaactattaccatgatactcataccgatgctatgaacatggttttatggttaaaaccacatcagattaaaagaaagaagtttacgttttgagtgaaaaaaatgttcgcattttagcttatgagagttcttgtgatgaaacttccactgctgtcattaaaaatgggcgtgagattgaaagcttaatcgtagcaacgcagattaagagtcatcaacgctttggtggtgtagtccctgaagttgctagtcgtcatcatattgaagtggttagtcagattactaaagaagctttggctgaagctaattgtacttggaaagatatcgatgcaattgctgtgacttatggccctggcttagttggtgctcttttaattggtgtaagtgcagctaaggctgcttcaatggcaacgggtattcctttgattggtgttgatcatattatggggcacattatggcagctcaactaaaagatgagattgaatatccagctcttgcattacaggtttcaggtggacatactgaaatagttttacttaaggatcctgttcattttgaaattatcggtgatacgcgcgatgatgctactggcgaagcatacgataagattggtcgtgttcttggggtaaactatccagcaggtaaaactatcgatgcctgggctcatgaaggcaaggatacctttaacttcccacgagcaatgatggaagatgatgactatgacttctcattctcaggtttaaagtcagcttttattaacacttgtcatcatgctgatcagattcatgaaaagttgaataagtatgatctggctgcaagttttcaagcagcagtaattgatgttttggctcataaaacaattcgcgcaattaagcaatataagcccaagacctttatcatgggtggtggggtagctgccaaccatggcttacgtgatcgcatgagtgcagaaattgctaagttgcctaaagcagaccaacctaaggtgattttgccagatattaagttgtgtggtgataatgctgcaatgattggggctgctgcgtataatctttataataatggtcaatttgcggatttgactttgaatgctgatccatcacttgaattgccatatgctaagagcatgttgaattaaatagaataactttttaaatcaaatacctagaacgattatttctaggtatttttttctactaaggcatggtccttaggatcttttaaatctaaggcgattgattcgtaagcgtcaaataaaatagtgtacttaaaaaccgtcccagttactgttatactgagacggttatttaagttcttttatttacaatttatctggatcttctcttgccacggtaaataagcttcaagggtttccgaatccagaatctcttcattcggtaatttctgaagcaaataattcaagtacttttcaggatcaaggccatttctcttggcagtttcaattaagcttagaataaagccacttgcagtagcaccctcaaaactttgagaaaataaccaattcttccggcccatgacgagtgattttacagcgcgttcagccttattgttagataattctaaattgccatcaagcaagacatgctcaaaagtagcttgatgcttgagggtataattaatggctcttcccaatttagagcctggcaaaacggtgattttatttttctcacaccagttgaagaactcttgcatcagaggcttgagctttgcttgtcttagctggtaacgttcttgtttgctcaaattctcccaggtttgttctaagtaaaacatgcgattgcagtagttgagtcctttttgggcaagggacttttcagaagcctgttgtggtacggcttcgtgaaactttcttctaacatgagcccagcagccaactaaagttgctttcggcaattgctcataagcctgccacatatcacagtgcaaataaccgggatagtttcctaaaaagtttaaggcaaccttgcaactccgggaaggatcatgatgatagagtgtaatcccgtattgatcatgtttgcctgaaaggaagacccaatagtaagtcttgattgttttactttctaagactgtataataagtttcatcggcatgtaaaattggccgcattaacagcttttgcttaagcagatcatacactggtttaaagtagtattgactgcttttcaaatcccaataatttaacatctgtcttgaaacttctagtcccatcttcttccagtcgctttcttgacgatagtccggcaccttcatttcatatttttgataaagtgaatgagcgatgagtgaagctgaacctagaccatggtttaggggagctttaggtactgcagctttaatgatcttgtcgctaagatttctttgactgcaatatttacatttgtaagcatgttggatatggtctaaccttttaagttgagctgggataaacaataattcttggcgaactgactgcttgcctatctcaatcagttcatgatgacaatcaggacaatgcttgtcgcctaattcatggtgaacctcttcagctggaagggcagctagtaagtcagcacgctttcgtttgtgagcttgtcttttataagtaatagtctgaacggcggcgtcggggacgttctccgtcatcttgagcatcaggttcatcaaagagacttgtttgtccatttaaaggcatttgttctgaagatttgccataacgtttttgcgttaagtaagctacttgttcacggaggagcttaatttcatcagttaagttttgaatagtagttgcttgttgtgcaataatcttttccaaattttcttgtgacatgagttaaacttcctcctaaatttattagttaaaagaatatcaaaaaagcgtgcgatgtcaagtgttagtagaattcgcacgctttcgtgttctttatttttggattgattgcgaagcccttcattagccagtcgacctgctcagaagataaagcttgaacttcattttgattcctgggccagttcaattttccattttcaaatcttttgtagagcagccaaaaaccttgtccgtcccaataaagggctttgaagcggtccttgcttccgccgcaaaagaggaagactttgccgctaaaaggatcaagttcaaactgttctttgactaaagttgctagtccatcaatgcctttacgcagatccgtcttgccgcaaacgatatagacttgccctaagtcactgagcttaatcatggcaagactttctcaagcagcttattcataatttcagggtctaagctgctgtaaaaattcagctctaagtcattcttctttaaactaagcaacagattattgcgtggtggacgagccttcttaggtttagaagaacggccaagtgccacaatgggttgttgtttttcgatcatattcttaacctccattaaattgatgagattagaatacctgaaaaatacggactaaaaaagatactcggttatatgacgcttacattgattccttgcctgcgttacaaattctaaagtattcgctagaaccatctgcgatatatggccccatgtgacgcgtgtcatcgcctgtttttctttcgatatgaattacccgggcaccactatctgcgagcattctggtacaagtagggcctgagaggacgtgggtaaagtcaataacgagcatcccgcttaaaggataaggtttgtttttatctaaatgactgttttttgcttctagctcagcataattaggttctgtcatagttgtgcgctttctattttaaaaagaaaaagctgttcgaagtgaacagctttttgatgagaataaattaattattcacccttgataacttcagtacgtggattcttaggaccttgagccttagaaattacgccttcttcagtcaatttttcgatttgatctggatcataaccaagtgaagctaaaatttccttgttgttttcaccaagatctggagcacgcttgtagttagaaagtgagaatggcaaaccaatagtcttgaacttaccacggttaccaccttggtcgatggttacgatagtaccatccttgttcaagtccgggccattttcaatttcgtgccagtcaagaactggacctacaggaataccagcagcaccaagcttcttagttaattcatacttgtcgtattgcttagtgtagctttcaattaatgggtaaatttcttccttgtgtaattgacggttgtgccagccatcaaagcgaggattagtttcccaacctttagccttgtaagtccgaccgataacttggccaccttcagtgttctcagcacgaggaattgccttgccccatttccagttagggtaaacagcgtagtgaggaagggcacctaagttgtctaacatgatttggttacgcaacttgatacggcagaggttcaatacagcgtcttgcattgactggtaaacaaaaataccttcactggtgtgttcacgttgaagaagggcagctaagataccaatagtaaggtgcatccctgggtttgagtcacctaaagtagcagctgattgagtaggaacgttggctttgccttcgttccaaccagtagcagaagcagcaccaccagcagattgagcaactggttcaaaggccttaacgttttcaaaacgtgaatcttcattgaagcccttcaatgatgcatagatcaatcttgggttcaaagcgtgaagcttttcccaaccaaaaccgttacgatcagctgaacctggtgcaatgttttcaacaaagacatcagccttcttagccaagtcgtacataatctttttaccttcatcagtcttgatgttcaaagtcaaagacttcttgttggcgttcaattgcaagtagtaaagactccatgaatcttgaatatcaagtaattcatttctagtagggtccccagtgttagtacgttcaatcttaataacttcagcaccaagccatgctaaaagttgagtacatgatggaccttattgaacttgtgtccagtcaacaactttaataccttttaaaggtgcatattcattttcttcagtcgtgattaattgtccttatcttcaagttgtgctaaatctaattctgggtttaagttaccaatgtgaccagattccttacccattgattcaggaatttgagcatcaataattgaaggattacctgattcgtaggccttttcaagagcatccttcatttcagcgtagttacttacacggtagctgtcaccaccaaaggccttagcgatttcagcatagtgagcattgtggcttaaaacagtaggtcctaattggtctttaactgggttacggtcaccattgtagataccaccattgttaatgatgacaacggtaacaggtaagtggtaacggcagataatttccatttccattccgtccaaaccaaaggctgagtcaccatgaagtgagatgactttcttaccagtttcaacagctgcagcaatggcataacctaggccgacacccattacgccccaagtaccagtatcaagacggtgacgaggcttttgcataccgattaagttacgaccaatgtccaaagtgttggcaccctcacttacgatgtaagtgtcagggtgcttttgcatcaagttattgataggttcaattgcactgtagaagcctaaagttggcttagcttcagaatcagcgattcttttagcaaatttttcattgttagcttcacaggcattcttaattgaatctagccagtcttgaggggccttaacgttagctttttcaaggggtgcgtttaatttttgtaaaacagaagtaatgtcaccttgtaatggggcatcgatctttctgtttgaatcaaattctgttgcgtcaatatcgacttgaacaaacttagcgtcttcattaaacaatggagcctcaccatttgaaagcatccaattaagccgagcaccgattaataagactacatcggcttgacctaaagtaaatgaacgagctgaagcagctgatgatggtgagtcatctggtacaacgcctttagccattgacatcggcaaaaatggaataccagtcttagtaactaattctctgacttctgcttcacttctagcataagctgagcccttacctaggataatagcagggtgtttagcgttctttaataattcaacagcacggtcaattgcatcatctgatggcaattgctttggagctggatcgactacttcatagatatgagcgtctgacttttgtgcaactgtgtcggcaactgttgcagcaggaaggtcaaggtaaacaccaccaggccgaccgctcatagcagttctaacggcacgagcaactgctaagcccatgtcttcagcacggtcaacacgataagctgctttacataaaggtttagcaacattgtattgatcaagtccttcatagtctccacggtcgaggtcgatgatatgacgatctgatgaacctgagatcataatcattgggaagcaattcttagtggcttctgctaaagcagttaaaccatttaagaaaccaggagcagaaactgttaaggctacaccaggcttgccggtaagaaaaccagcagcagcggctgcgtctacagctgcatcttctcttctaaattcataaaacttcataccctttaattcagctaaacgggcaaagtcagtaactggaatgccgacaccaccatgcatgttgtttaaaccgtttgcttgtaaagcatcgattaaaagtgcagcaccagtaagtgatacatcttgtgtcacgaaaaaaaattctttcaaaaaatccccaaatgcttatgtttatgcatttcaaaaccaagatacacctcttgaattgtatatacaggcacaattgaataataaggtacgttattttaatatgcgcatataaaaataagcaagtcctaatatattagaacttacttattatacttttattcaaaattgtccatttcttcgattgccttttcccaggcagaatttgcttcatctaatttctgttgtacatcagaaagctgttcttgcagtggccccaatttatcaaagcttgaagcaatttctggattggccatttcggtttggatttcttgctctcgttcttcaagctgttcaatttgtttttctgcattatcaattgcacgctgcaactttctcttttgagaatcacgttgcttttgctcttggtaagaaagtttttgctggctaatttgtttgcttggctcgacttctgtctcagcggcactattttcagccatagctgcttgttttgccttctcatcaagataataagaataattgccatcgtagactttagcatgcccatcgcgaactaaaacaatcttattagctagttgattgataaagtaacggtcgtgggaaacaaagagcagggtaccatcaaagtcttttaaagctttttctagtacttcttttgcttcgatatctaagtggttagttggttcatccatcagtaagaagttatcatgttcaagtgataaaacagttaaagttaaccgtgctttttgtccaccagatagttgacctacggtcttatcaatgtctttagctgtgaataaaaagctggctaagattgaccgtacatcgcgttcaggcatggtcttatgacgatccccaacagtatccaatacagttttagatggatctagtctttgtaattcttggtcgtaataaccaatctcaagggatgcgccatacttaattgagccactcttgggcgttaattgcttcataatagtcttaagcagggtagatttaccgattccatttggtccaatgatcgcgacgcgatctcctttattaatctggaaggaaatatctttaaccatggttttatcgggataaccaatcgtcaaatcgttgaaaattaatacttccttgccagaaggatgatcgcttgaaaaatgaatccgtaccttatttttatgtttaggtggagtaatccgctcaattttttctagttttttacgccgactttgtgcacgcttagtggtagttgctcgaaccaagtttttttggataaattcttcatcttttttgatttcagcttgttgcttttcataagcggcttcttggtccttatcacgttgctcgcgctgcatgacataggctgaatagttgcccttaaaagcagttaatttaccaaattctagttcaaaaatttgggctgctaaatgatctaagaaatattggtcgtgggaaaccacgaggattgcaccactgtaattctttaaaaatccttccaaccaatctagggtatctaaatctaagtagttagttggctcgtccaataacaacagagcaggtttgcgcaaaagcaacttaacaaaagctaaccgtgttttttcaccaccggataaactaccaatcttcttttgccaagtgtcttcaggaaacttaaagccattcaagatacttttaatatcagattgataagtataaccgcctttttgttcaaagttgaattgcttttgatcgtattgcttaagcaattcttgatcttcaggatgatctgcaattttttcttgtagttggactaagctttttctttcccttattaaaggagcgaaaacggtttccatttcatcccaaatggttttattttcatctaatgcattttcctgagcgatataaccaacatcaatgcctttattaactgtaaattcgccgtgagttggttcttgctcacctgtcattatttttaacagggtagtcttaccaaccccgttaggaccaactaagccgattctggcattggaatcgattgaaaaattaacatttttgaataatgtgttggccccaaattgttgttctaaatcgtgtccttgtgcaataatcataatttttcacctaaccactattctaccatatagcgcaaattgtttgtttttaagttaaatatgtgaaaaaatgatgatttgtgaaaaagatacttgcataagtactatcatagcaggtatgatagtagtgcttgattgtacattcacaaacatttaagtttggagggttcctatatggaaaaaataaaaatcccaaaagcaacggcaaaaagattaccattatattaccgttatttgattattttaaatgaagaaggcaaagataaggtttcttcaactgagctgtcagaggcagttcaagtagatagtgcttcaattagaagagacttttcatattttggtgcgttgggaaaacgtggctatggatatgatgtaaagaatttattgagcttcttcaagaaaattttgaatcaagatactttaactaatgttgctttaataggtgtaggtaatctgggacgggcgctgcttaattacaactttaagcgcagtaataatattcgaatttcctgtgcttttgatatcaataaggagattactggtcgtatcttaagtggtgtccctgtttatgacatggacgacttaaagcaacaactaagtgatcaacagattacaattgcaattttgacagttccttcaacagctgctcagaaaaccacagatgaaatggttgatgcgggtgtaaagggaattatgaactttactccgattcgtttatcagctccagctgatgtgcgagtacaaaatgtagacttagcaaccgaattgcaaacgttgatctatttcttagatagtgacaaagaaaactaaatttgagtaaaagaaacatactaacctagtgttggatcatgaatcgacggattcacgatctggcactttttattttgtctaaaatagaaagtgaagataaagcaaatcaagtcttcagctttttagacacttgatgtcgtaaaagaaacggactgctttaccacctattcttaagtctcttcgaagtctgtgggcacttagatgccgtgtttagaaaattagaattaataggttgataaagaggtttatcttcacagcggaggttatattatggaatcacaaattattttcggtattgatgttagcagtaaatcttccacagtttgtgtggttaatgaccggatcaaacaaggcgaatcttttagaatctctaatgattcctttggctatcaaaaactttatgagcaactgaaccaatatttgataactcctttagttgttttcgaagctactggtgtttattctctaagcctgcaagctttcttagaggattatcatattaagtatttgaagcttaatccgcttaaagcgaaaaagctaatggacaataatttacgccataataaaactgataaggtagatgcttatcgcctggctttaattcaatttaatgccccgcaaaagttgcgtgatccacagcccagagagtatcatgaacttcagaatgccagtcgctattatgaagaacttactaggagtatagttactactaaaaatcaattgcaccgcaacctccaatccactttcccacaaattgaagaaatactgtctcatccatctggcagaatttattgggcgcttgttagtcttttcccacatgctggatatgttctagaaaagaatgagacacaggtaactcaaatgcttaattctatttctggaataggacaacaaagggcacggtacttaaccacaagattatacgcttttgctagagaagcttatccttatgattccaaagatagtattatcgttagagctattcaaaggaacatttctaatttgttttcactccagcaagaacgcgactatgtaattaactacatggaaaagctggctaaagcagtaaacgctcgtgctttatccatctatttgagtatcccaggggttgctagaattacagcagtgagattagtagcagagctcggtgatctaagacggtttagcacttcagctcaaattgatgcgtttgttggcattgatccaggaaggtaccaatctggtgaaaaagacagttctcttggcattaccaagcatggcaatcatattgccagaaaaatactttatcgagttattactcaaatggagacggtaaaggctacgcagccttgccatataactgattattatgacaagaaaaaacgatcttcaaatagacaaggctataagaaaatcgccattgcatcagtccataaactgatacgcacaatgtttgctcttatcaaacatgatcaattatatgattacaacatagccaccgaaaataaaagactttagctgaaatcaaataatcaacttaagtataagcaacctatggaaaaactacaagtattcataggcttatttgtggtactttcgctttttcttaaatttaaactcttatttgctttaaccttattcgcatcattaaaacaagtaaatttattttcttaaatcattgataatacttgactttgggtagaaaaaagccgattttcggctttttttcatgcagttgtttcacttttgattaatttgacaggcaaaatataattcttttggcgcaatttttcgtcgggattggaaattcgggtaagcaataacttaaccaataaagttgcaatatcatgaattggctgagcaattgtggatagttccgaatggtaagtttgaatttgctttgttccgtcaaaaccaatcacttttaattccttaggcactttaatgcctaatttttttgcttcttgtaaaactaacactgcagttaaatcatctgtgcagacgacgccatcaggctgatcattgactaacatatcatgaattttcatatttttaatgttggaagaatcagaaaaagcaactgaacgaatgtgggctgaaaagtgacattcctttgcttcatcaagataagctgctagtcgttcgtcagtcggattaccttttctgtgttcattgcccagaaagtaaattttgtgacaaccagcttgaaccaagtcatgtactgccaacttgatgccttgataattatcacaactaacaattggaacattatcagatagctttcggtcgaaagagacaattggcaaacctagttgttggtattcattgatacctagattgtgcgcaccagcgatgatgccatcaacttgattagcctgaagcatgcgcagatattcgcgttctttttctttgttttgtcctgcattgcataggattactttatagttttgttggaataaagtggtttcgatatcctgtactaattccgcaaaaaaaggattagtgatctcaggaaaaatcaaaccgactaatttcattttctttccttgtaatgagcgggcaatagaattgggacgataatttaattcccgcattgcggcaaaaactttatctttagttttttgacttaaatagccatggttgttgattactcgcgaaacggtagttacagagcaaccggcttttttggcaacgtcgcttaattttgctgccatagtatcacctgatgtttaaagaattgtttgcatttgccaaagcttgccagtgtagtcaatgtcttgagcaaacgcaatttttttgttggtctgatcggcaaagtagcgtccagtcaataccttttcaccatcattaacgaatacttcaattaatgaatgatcaacaaagatatcaagcttgaggtcatgatttggtgaaagcgtaatagctcgactttcgccataatcaactgctactttttgcccagcatgagcacgatctaatactaatttaccatttttggtatcgaaattgagctgtaaactgttacttaagtcattatttgcagctaaatgtaaagtgccactttggttagccttaattgttaattcaagttcaaattgttggccggcttgatcgctgactacttgattagatatgcttgcttcgtttttgcggatactgcttattgccttaactggcgtttgaattaacttgtcactctttaggtggagttccttcacttgactcaagcagttagcccagttttcatcatcagtagggtaagtagtgtcaggcaagccaacccaactgacttcgtaggcattaccatctggggcgttaaaggcctgagtggcataaacatcgaacccgtgatccaaattgtgtaatttacctggattaattaacttatgattttcccagtcaatatcatcagcaataacgtacatatttgggtaaatgtcatcataagctgctacttttttgtctaaaccctgaggacagaaaatgaccacgactttgccatcaacacggacgatgttgggacactcgatcatgtagcccatgtcttcgttggtaaagtctaagaagcccaattcttcccagttctttagatcctgagacttccaaacgtcaatgtgaccgtgtttttcctttttatcttgggcacctaaaattgcgtagtaagtgtcattttctttgataatttggggatcgcgaaaatgttcggtgatgtgatctggattcttaaataggatggttttgtctgaaactttattatttttatccatccaagcaccgatttgataaggagtacgtacccaattttcatcgcggtggttaccggtatacatgatgaaaagcttaccatcgatttcgcgagcagagccagaataagctccatgtgaatcagccattgtgtctggttcaatacctaagcctaagttttcccagtgaaccatgtcagttgatttgaagtgccaccatgactttagaccgtgaactgcgccgaatggatatgattgatagaagaggtggtaagcaccatcaaagtaggaaaatccattagggtcattaattaagccagaaataggatgcaaatgatagcgcatttggtaaggggagtttgcggcttgtgcttgcaaatgcattaatgtatcagcgtcccaatcttgataaggtaagtaacgtttttctcttgtccattccataaatatacctccatgaaagcgttgtctttttacatgtattttaagttagtatgaaaaatatgtcaaacgtttaacagaaaaaataattattaattcataagtaataaaataaataaagaattttatgtcaaacgattgacatattttttgaatgcgttatcataattagtgaattgagaataaaacgtttacataggagggatcaatatggaccacagaaaagtggctgaacgagtaattaaagacgtcggccgtgacaatattattgccggtgcccactgtgctactcgtctgcgtttagtattaaaagatgattcaaaagtcgaccaaaaagcattggataatgatccagatgttaagggtacttttaaaaccaatggtcaatatcaagtaattattgggccaggagatgttaatgacgtttacgatgagttcattaaaatcactggtttgaaagaattatcaaccgatgatttgaagaaggttgctgcagaaggtaaaaagaagaatccagtaatggatttcattaaacttttgtctgacatctttgttccaatcattccagccttagttgctggtggtttgttgatggctttgaacaacttcttgacttcaccaggtctgtttggaccaaagtcagttgttcagatggtaccgaatgttgctggtatttcaagtatgattcaagttatgtcagcagctccgtttatttttatgccaattctagtcggaatgtcggcagctaaacggttcggtgctaaccaattcttgggtgctacaatcggaatgattatgacgacacctggactccttggtgcaaatcacttctgggacatttttggcttgcatgttgcgcaaactaactatcaataccaggttattccagttttagtagctgtttgggtattgtcaattttggaaaagtacttccacaagcacttgccatcagctgttgactttacctttacgccacttctttcaattatgattactggctttttgacttttacaattattgggccagtcttcaaaggcgtatcagatggtattaccaatgctatcgtttggctatatgacactactggtgcctttgggatgggtgtctttggtcttacctattcagctattgttactactgggcttcatcaaagttttccagcggttgaaactcagcttttagcagcctttgctaagaatccagccagctctggtgactttatctttgttaccgcatgtatggctaacgtagctcaaggtgccgcaactttcgctgtttacttcttaactaagaacaagaagatgaagggcttggctagttcatcaggtgtttcagcacttcttggtattactgaaccagcacttttcggtgttaacttgaagtataaattcccattcttctgtgccttaattggttcaggtgtagctgctgcttttgcgggcttgatgcatgttactgcagccgctcttggttcagctggtttcttaggcttcctttcaatttatcctaagactattccaatgtgggttgtttccgtattaattagttttgctgttgccttcatccttacttatgtttatggtaagggtcatttgaaggaagaagttgctgaacaagatgttccagtaaacgacgcaactgattatgctgaagaaactcaaaaggctgaaaagcttggtaaggaacaaatggcattaaaggatgaagttattgcttcaccagttgatggtactcctgagagtttaactaaagttaatgatcaagtattctctgctaagttaatgggtgatggtgcagccgttattccaagtgatggtacgatctattcaccagttactggtactgtgactattgcttatgaaactaagcatgcttatggcattaagtcagacgatggtgcagaagtattgattcacattggtcttgatactgtaaaccttaagggcgagcacttcgaaagtttcgttaagcaaggtcaaagagttaacaagggcgataagcttggtacagttgaccttgatgctgtgaaaaaggcaggctatgatactactgtcatggtagtaattactaacactgccaactatgcaaatgtttcaagaattactgatgcgggtgacaagcacggcgacaagttgattgctgttactgcacacaattagtttcttctactcctctagaaaaaattaaaacaattagaataaaagacgctaagaaagattgtttcttggcgttttttagtactaagtgttgcacttcaattttaagtttgagactgtaaaatagtttgtgtaaggatgaatgattccttaaatttatttctttaaacattagaaaaaggagttcctttctcgtatgattggtttgaacaaaaaaacacatacagaaagaagaactccttcatgaatgattttaccaaagattttgctcaagctctattcaatccagacaaaataaatgatttattgcgcaaagagctacaacaggctgttaataacttgttagaagctgaattgactgcctttctgggctatgatccctatgccagaaatggctggaatactggcaactctagaaatggtgcttatttccgcaaagttgatacgcaatttggcccaattgaagtgcaagtgcctcgggatcgcaacggtcaatttcatcagcacacgctgcctggctacaagcagcactcggatatcttggaaagcatgattatcaagctttactccaagggcgtgaccaccagggaaatagccgatctaattgaaaagatgtatggcagccattacagtccagctcaggtatcaaatatttccaagcagatgattccaaaggttgaggcttaccacaaacgcaagctaagcgacaagtttttctgcgtctatttggatgcgacataccttcctttgcgccgagaaacatttgagcgtgaagcagtctatattgccattggcatcaagcctaatgggcacaaggaggtcattgactactgcattgcgcctagcgagaacattgaagtctggacagatatgcttcaaaacatgaaatcccgaggcttaaagcaagttgagctttttctttctgatggtgttgttggcatgaaaacagccttggccaggacttatcctaaagctcattttcaacgctgtttggttcatgtcatgcgcaatatctgcgctaaagtacgcgtcgacgatcgtgaaaagatcatgaacgaattcaaacaggtgcatcaacagacaaacaaagaagaagccacagctgtcctgcatgacttctataccaaatggggcaaggtttacagccatgttatcagaagcttgaaagacatagaaccagatctgctggtcttttataactatcccaagcagatcagagcttcaatttattcgactaacatgattgaatcatttaacaatgtgatcaagcgcaaagctaagcctaaggcagagtttccaactgaacagtcgcttgatgcttttattggcattcaggcaatgagctacaatgaccgttatttcaatcgaattcataaaggctttggtcaggttcaggacaccttagaatcctactttgattaaataaataattaaaaaatcaatttacgagaaagatctatttacacaaaagatttgacagtttcttaagtttgagtaaaatgttctctataaagaaaaacaaagtgagggtatgttttatgaagttaaaaagtggagttattggagtattagtaactggattaactgtctttagcattaatctaactagctctaaaataaaggcagcgataacagtgcctaatcctaagacagattatgtagttaaaactacttctaatgtgtataagagtaatggtaagaggaccagttttaagacacgtggtcagatacaaaccggtaatgttccagtaattgaatcacaactatatgaaggcaagttcattaatgtgcaaggaactaagacgattaatggtactgcttattataagatcggtcctaacgcatacattaaacaaaataatgttttaaattatgctcaagaaaaagcaaagcttgaggcatatcaggcacaagatgatgtgaatgatgattcagatcagtcaacagaattaagctctgatgatgtgaattttgacatagcttggtatgacaacattaatgaggatccatctccagcgatgttcgatgattcaggatatcataatagagtgattaagaatgctcgtaaattattaggctatttcacttatggaacaggtgcataccgaactaattttggcagttggcgtcatcctaataaaaacggttcaactgattgttcaggatttgtgtggatcgtaatgaagagagcaggatatcgtgtaggaaatgctccattttttactctgccaatggaacgagatgctaaaagtactcatggctatttgaagaaaatttctgccaagaatattcgcccaggtgatattgtgattgttaatactggcaatggtgttggtcaaaacggacatgcagcaattgttgatggcaaatatgatggttgggacacgcaaattattgaagagggcggcaacttaggtgtagatgatgtgcaccgctctagtttaggtagctcactgagcgataagctggccaaaggtcgaatcacttatgctcgccccgttaaatagtatgctctatgctataattttgctaatcaataaaggataataagaatgaaaaagaacagcacgcttaaacatgtctggattatgacggctgtctattgggtagtaggtattctaagtattttctggggtaagcttgatcatacttttgcgtctcaattaaaagagatcaataatatttacgtgttagttttaataattatcttaagcttgccgctacttttatcgctgttattgtcggttaaagtaaaaatgccacgtttgatctgcaatccactagttgctgtaatttatctattagtggtaattgcagcaggtgtagcatataacttacaaaatattattggctacttcttcccaatcatcctcttcattattatggcgctagttgctgttttctatgctttggttaagacttttagcagcagaaaaagtggtaaatatttttttattgatggtaaagataagaaagaatgccatgatttctgggatgcttataagaagtactatgtaatgggattaacttacggcattattgatggtttgattactgtaattagttaaaaaagttaagaaaaatcaaaattagcactcaattgaaaaaagtgctaattttttcttgctttttttcacaaaacagtttattatcatatttgtaagttagcacttagcaaataagagtgctaatgattaatacagtaataaaaaatataatgaagaaaattaaacataagggggactaaacgtgttacaaccaattggtgatcgcgtgatcgttaaagttaagaaagaagaagaagaaactgttggtggcatcgttttagcatcaaatgctaagaagaagccaactgaaggcgaagttgtagctgttggtgaaggtgcttacgcatcaaacggtgaaaagattccaatggctgttaagaagggtgacgtagttctttacgataaatactcaggcactgacgttgaatacgaaggtgaaaagtacttagtccttcacgaaaaagacattttagctattgctaagtaatttagttaaaatttccaacgataattaagtaaattaaggagcatagataatctatggcaaaagatattaaattctcagaaaatgcaagacgttctcttttaaagggtgttaataagttagctgatactgttaagactactattggtcctaagggtagaaacgttgttttggaacaaagttacggcaaccctgacatcactaacgatggtgttaccattgcaaagtccatcgagttaaaggatcactacgaaaacatgggtgctaaacttgttgctgaagctgctcaaaagactaatgatattgctggtgacggtactactaccgcaactgttttgactcaagcaattactaatgaaggtatgaagaacgtaactgctggtgctaacccagttggcattcgtcgtggtattgaaaaagctactgaagctgctgttaatgaattgcacaagattagccacaaggttgaatcaagagaccaaattgctaacgtagctgcagtttcatcatcttcaaaggaagttggtaacttaatcgctgacgctatggaaaaggttggtcacgatggcgttatcactattgaagattcacgtggtatcaacactgaactttcagtagttgaaggtatgcaatttgatcgtggttacttatcacaatacatggtaactgacaacgataagatggaagcagatcttgataatccttacattttgatcactgacaagaagatctcaaacattcaagatatcttgccacttcttcaagaaattgttcaacaaggtaagtcattattgatcattgctgatgacgttactggtgaagctcttccaacacttgtattgaacaagattcgtggtaccttcaacgttgtagctgttaaggctcctggctttggtgaccgtcgtaaggctcagttacaagatattgctgctttgactggtggtactgtgattactgatgacttaggtcttgaattaagggacactaagattgatcaattaggtcaagctcgtcgtgtaactgtaaccaaggactcaactactattgttgacggtgctggttcaaaggatgctattcaagaacgtgaagattcaatcagaaagcaaattgaagaatcaacttcagactttgacaagaagaagcttcaagaacgtcttgctaagttaactggtggtgtagctgttatccacgtaggtgctgctactgaaaccgaattgaaggaacgtcgttacagaattgaagacgctttgaactcaactcgtgccgctgttgatgaaggttacgttgctggtggtggtactgctttagtagacgttgagaaggctatcaatgatcttaaggctgatactgcagatgaaaatactggtatccaaatcgtattaagagctttgtcagcaccagttcgtcaaattgctgaaaacgcaggtaagaatggtgaagttgttttgaaccacttactcaagcaagaaaacgaaattggctacaatgctgctactgatacttgggaaaacatggtagatgctggtatcattgacccaaccaaggtaaccagaaccgctttgcaaaatgctgcttcaattgccgctcttctgcttactactgaagctgttgttgcagaaattcctgaagaaaagccagctaacccagctccacaagctggtgcaccaggaatgggtatgtaattatatatcttaatgctttagcatttagatatataattcttgattacgaagtaatcaagttcatttacagtgctttagcactaaacttatgcacaaactctcactctagttcaaaaacaaatataattaaaatgacttcgaagttaaacaatcagttcagcttcgaagtttttctttttgtagcgtataatattgtacgtaactctatctaaaatacgaaataggaaagagacataaatgacggaaaaaacaactccaatgatggagcaatattacgaaattaaaaaacaatatcctgatgcctttcttttttatcgcgtcggagacttttacgaactgtttgaagatgacgcagttaaaggtgcacagattcttgaattgactttaacgcaccgatcaaatagaactaagaatccaattccaatggcaggtgtgcctcatatggctgtggatacttatgtaaatactttagttgaaaagggttataaagtagcactttgtgaacaacttgaggatcctaaaaaggccaaaggcatggttaaacggggaattattcaattagtgacgccgggaaccatgatgaatgaaggcccaaatgatgctaaagattcaaattacttaacatcagtaattaccactaagagtggctttggtttagcctacagtgatttatccactggtgaaatttatgctactcatttaaagagtttcgatgctgtttccaatgagctcttgtcacttcgtactcgtgaagttgtgtataacgggtcattatctgaacaaaataaagactttatgcacaaggccaacattacgatttctcgacctactccaattgaaggtgaacatgctgaaatttcttatgttgaacagaatttgactaatggggctgaaaaagaggctacccgtcagttagttggctatttgctttcaactcaaaagagaagtttagcgcacttgcagattgccaaaagctatgaagtaaatcaatatttgcagatgtcacatactgtgcagaataatttggaattggttgcttctgccaaaactggcaaaaaaatgggttcacttttctgggttttggataacacacacactgccatgggtggacgcttgcttaagcagtggctagctcgtccattattaaacatggatgaaattaaccatcgtgaagaaatggtgcaggccttgcttgatggctactttacacgagaaaatgcagttgatgccttaaagggtgtttacgacttggaacgtttaactggtcgaattgcttttggtaacgttaatgcgcgcgaattactacaattatcacgttctttgcaggccgttccagttattttagatgctttagagcaatcagattcagatatcttggtcgattttgctaaaaaaattgatccattaaagggcgttgccgaaatgattacttccactatcgtgaaggatccacctgtgttgactactgaaggtggcctgattcaaggtggggttgatccgcagcttgatcgctatcgggatgccatgaacaatggaaaaaaatggttggctgaaatggaagcagatgagcggcaaaagacaggtattgataacttaaaggtcggttataacaaggtctttggctattatattcaggtttctaacggtaacaagtctaaggtgccacttgatcgttatacgcgtaaacaaactttgactaacgctgagcgttatatcacaccggaactcaaggaacatgagaatctaattcttgaggcacagacacggtcaactgacttggaatatgatttatttgttaagctgcgtgaggacgttaagaagtatatccctgctttacaaaaattaggtgggcaactagcagcgctggatgtttattgtggttttgctacagtagctgaacaaaataattattgccggccaacttttcacgcagataatcaagatattaatgtgactaacggccgtcatccagttgtggaaaaagtaatgacggctggttcatatattcctaacgatgtcaaaatggatgaaggaaccaacatttatttaattacaggtcctaacatgtctggtaagagtacctatatgagacaaatggctttgattgcgatcatggctcaagtaggttcctttgtgccagctgatagtgctgatttgccaatttttgatcaaatttttacaagaatcggagcagctgatgacttaatttcaggtcaaagtacctttatggtagagatgagtgaagctaatgaagccttgcagtatgctactaagcgcagtttggttctctttgacgaaattggtcgtggtacggctacttacgatggaatggctttagctggtgcaattgttaagtacttacacgacaaagttggtgctaaggcattatttgctacgcactatcatgaattgacagtgatggatgagactctggatcatctgaaaaatattcacgttggtgctaccgaagaaaatggcaagttaatcttcttgcataaaatcctacctggacctgctgatcaaagttacggaattcatgtagctcaattagcaggtttgccgcgcaacgttttgcgagaggcaactaaattattaaagcggcttgaagcacaaggcagtgaactagcaccagtttcgcagcaattagatttatttgcagagcctgtggaaaacagtgttgaagaaactgaaacacaaaatgacaagcccgcaataactgatgcacaacaagatatacttgatgatatttctaatctttatttagcagataagacaccgttgcaggttatgcaaatggtagctgattggcaaaaagatttaaaggatgacgattaatgagcaaaattcatgagttatcggaaactttaactaatcagattgcagccggagaagtaattgagcgcccagctagcgtagttaaagaattagtagaaaactcgttagatgctggtgctactcgaattcgcgttgattttgtagatgctggtttgaaacagattgtagttcaagacaatgggacggggattgcacgtgatcaagttgatctagcctttacccgacatgcgacaagcaagattgccaatgaacacgatttatttaaagtttccactttaggcttccgcggagaagcattagcttcgatttctgctgttagccatgtggaaattctgactgcaactgaaaacgcaattggtattcgagctaactatagtggaggcaataaaaaaggccaagaagatgcagcggctcgtaagggaacaaaaattacagtcaaggatttgttctttaacacgccagccagattaaagtatttgcgtagttcaagaactgaaattatgaagattgtggatattattaatcgacttgtgttaggttatccacatgtgtcttttactttgtcaaatactggcaaaattttattaagaacgccaggaaataataatttaaagcaaacagttgctaacgtgtatggccgtcatatcgcagaaaaaatggaaaaatttgaggcaaaagacagcgattttaagattacaggtctgatgtctaaaccggaattaacacgttctacacgcaattttatttcgattctcttaaacggccgctatattaaaaattttcaattaaatacttcgattctggatggctatggctcaaaattagcagcgcggcattatccgattattgtgttagcaattaaagtagatcctttgttagtggatgttaacgtgcatcccactaaacaggaagttcgtttatccaaggaaaaagaactgggtcgtttaatcaccagtgcaattagtaatacacttgtggaaaaagttggacaaattagcgcttttgctaatttggaaaataaacgtgatacgctagttgatcagcttagttttaacttaaatcaagatgttgtaaatacagctcgtaaaaaagaaccggaaattcgcgaacaagaaaagccaaaatttttaacgattgaatctgatgattcagaagataatattcaaaatgaggcggtaaagcaggatagtgaaaagaaatatgttgatcttaatcagccacgtgaagatgatcaatatatcgttactaagacctggaaacaaaatgttgctctgcagcaagcactaacgccatttcctacaactaggactaatcaggaagtcatttcaagtggggatgaaactttagctaataatctgcctcgcttggtttatgttggacagaccgatacttatttatttgcccaacataatggcgacctatttttaattgatcaggttgctgctagacgaaggttaaaatttgagcaaatttttcacatgataactgccaaaaaagtagtacaacaaggtttgttaacaccaattattttagaatttggtaatcttgattttatgcaaattaaggatcaagtagaacagattaagcaggttggaatctatttggaagattttggacaaaatagttttattgttcgttcgtatccaacttggattcacgataatgtcgaagattcaattcggaagattttagatggttatttgaatgtggataaaggaaaggcaaagaacctgtttagccggatagcagcaatgcaagctaagcgagaaattactggcaagattaaattatctgcagctgaagctgagcaaattttacttgatttacgcaagtgtactgatccatatcatgatgcagatggacggataattttggttagaatgagccaaaatgaattgagaaaaatgtttaagaaggatgaataatgtacgaatattttgaaggtgtgattactgtggttacaccaagctatgttgtagttgatgtcgggggcgttggctacaaggtctatagtcctacaccttttgcctatactcaaggccaaaaagctaaggtctttattgagcaagtggtgcgtgatactggcattactttatatggttttcaaagtcaagatgataagggcttgttcttaaaactacttagtgttagcgggattggtcctaagagtgcaatggcaatcatggcagctgaggatagtaattctttggcggaagcgattgaacaaggtgaagttaagtacctaactcgttttccaggtgtgggtaaaaagacggcttcacaaattgtgcttgatttgaagggtaaattaggtgattatgttgctcggcttgatcgtccagacaatggtgagaatgtgccgccagcattaaatgatgcactgcttgctttaattgctttgggttatacccaaaaagaagtggatcggatcacgcctaaactggagaaagttgctgcaaatactgcagatcaatatattaaaaagggcttagcattactgcttaaaaagtagatcttggtataatagaacagatgattattttttaaggaagtgaaactggtggcagaagatcaagtaacttcaggtgatattgagaatcctgaagaacaacaaatggaactttctttgcggccgcaaacgctcgaccagtacttaggtcaaaagcgggtcaaaaaagaaatgagcatttatattaaggcggcgcgccaacgtgatgaagcattagatcacgttttgctttatggaccaccggggttaggaaagacaactttggctttcgtaattgccaatgaattgggagttcatttaaagagtacaagtggtccggccattgaaaaggcaggcgacttggtggcacttttgtccgacttagatcctggggatgttttgttcattgatgaaattcaccgtttagctaagccagtagaagaagtactctactctgcaatggaagactactatatcgatattgtgattggcgaggggcagactactcatgcagttcacgtgccgctgccaccatttactctaattggggcaacgactttggctgggcaattgtcagcacctttgcgtgatcgctttggcatcgtagagcacatgcagtattacactatcgatgagctagaacaaattgttttgcgttcaagtgatgtttttcacacttcaattgcgcctgaggcggcccatgaattggcacgacgctcgcgtggtacacctcgtgttgccaatcgcttacttaagcgggtgcgtgattttgcggaagttaagggagaaaaaacaatttcgctcgagactactgaaggcgcgttaaaacaattgcaggttgacgatgagggacttgatcagacagaccgcagattattgagaacgatgatcgaaggatataatggtggtcctgttggtattcggactttggcagctaatgttggtgaagatatggaaacgattgagtcactatatgagccatatttgttgcagcatggttttattttactcacgccgcgtggcagaatggtgacggataaagcatatttacagttaggattaccaattccaggtgataaatagtcccattttctgtataatggttataatatctagaaaataattttaatgaggtggaaattttgaacattttatttttagcaaatgccggtgctgcagcaagtagcaactggatgatgatcggtttatttattattttgatcgctttcacttactttggtatgattcgtcctcaaaagaagcaacaacaacaaagaatgcaaatgatggacaaattgaagaagggtgacgaagtcatcttagttgatggtttgcatggtaaggttgacaagatcaacagtgataagactatcgtggttgatgcagatggcatttacttaacttttgaaagaatggctgtccgtcgtgtgattccagttgctgcaccagcaactcctgcagctgaaactaaggctgaagctccagcagaaaagccgaaagaaaaagcagacgaaactaaaaaagaggataagtaatcatattacttaagagcgtcattttaggcgctttttgttttgctaaaaaaatccttgttgtaaaatagaagtgataattttagttcaaagaaagggatctgaaatgaagaatattcccgttgtaatgattctttttggtggtagtggtgatttggctcaccgcaagctttatccagctttgtttaatttgtatgaacaaggcttaattcacgacaactttgcagtaattggaactgctcgtcgtccttggtcacatgagtatttgcgtgagcaggttagtgatgctattcatgaaacgcacgatactgttgatgaaaatgagttgaaagcttttgcaagtcatttttattatcaatcacatgatgtaactaatgtggaacactatgagattttgaaaaacttggcacaagagctcgatgatcgttatagtgcacaaggcaatcgtctcttctacatggctatggcaccaagattctttggcacaatagcaacgcatattaatgaccaagacttgactggtagtggctttaatcgaattgtagttgaaaagccatttggtcatgatttggcttcagcagaggaattaaataagcaaatcacggcttcatttgatgaaaatgatatttttagaattgaccactatttaggtaaagaaatggttcaaaatatcatgccaatgcgttttactaacccaatggttcaaaatatttggtgcagcaagtatattaagaatatccaagttaccttggcggaacgtcttggcgtggaagcacgtggaggttactatgatacttcaggtgctttgcgtgatatggtacaaaaccatatttttcaaattattactctgctagcaatgccagaacctaaggatctttcttctgctagtgttcaccaagccaagcaagatttgcttaagagtttaattattcctacgccagatgatgtcaagaaatactttgttcgtggtcaatatttgggtagtgatactacttttgcttataagcaagagccaaatgttgatccagagtcaactactgaaaccttcgttgcaggtaaagttaagtttaatgagggaccaattgctggcgtaccaatttactttagaacgggtaaggaatttaaagaaaagaagaaccggattgacattgttttaaagcatattaataatccatatgggcaagctcattctaacaatattacgatcgtgattgacccaactagtgaaatttactttactattaatggcaaacgaattgaccaaccaggaattcgccgtgaaaacttaacttatgaattttcaaaagccgaaatggctaaggtacctgatggttatgaaagattgcttcatgatgtttttgtcaatgattcaactaactttacgcactggagcgaattgaagcgttattgggaatttatcgatgcagttgaagatgcttggcagaaggaaaatgaagcaggcaatccagccattgcacaatatttgccatacagaatggggccaaaggaagctaatacaatctttgagtcaccaactgaacattggatttatgaataaagaaaatttattaccgcaaaatgacatccatcgtcggattattcatctggacatggatgctttttatgcttcggttgaaatgcgggagcatcccgaatggaaaaataaggcattgattgttgggcaagatccacgacaaaatggtggacatggagtagtggctacttgcaattatgtagctcgtaagtatggcgttcattcagctatggccgcaattcaagcagtacgtttggttcccaaggagctaatagtttttactagaccacgatttgataaatatcgtgcagtgtcagctaaaatccattcttttatgcatgatgtgacagatcaggttgaatcagtggctttagatgaagcttatctagacgtgacacatccaaagatagagcaggagtctgcagttcaaattgctttagatttacagaaaaggattcggcaagaagtaggcttaaactcgtcttttggcgtttcctataataagtttttagctaaaatgggatcagaatacgccaaaccgtttggtcgaaccgtaattttgcctagtgaagtgcagaactttttagcaatgcaaaagattgagaagtttcctggtattggaccgaagacgcaagaagagctgcatcagatgggtgtttatactggggcagatttacaaaaaattgaggttttaaccttaattaaaaaatttaagaaaatggggtatattttagcccaacatgcacgtggaatagatttaagacctgttgttacagactcagaggctaatcgaaaatcaattggcatggagcggacttacgagcctgcaatttatactgaggatgaagccctaaccaatattcgtaactattgcaatcatttggaagcagcattaaaaaaacgcaattttaaggcaggtactgttgttattaaagtaagaaataataattttgatacggtaaccaagagaaaaaagttgaaaacaccttctgatagtcacttagatttttatgatgtggctcgtgacttgttcgaagcaacaagttcctttttagatgatggaattcgtttattgggagtcactgtaactgactttgaaaagaaaaaatatcaatcaatcagtttgttcgactaataaataaagctatttttctggtaaactagatacagatatttttacaagatgaggagattaaaaatgagtagttttgatgacatttatgaaaaaatcttacaatatcctacaattatcttgcaccgccacactagtcctgatccagacgcaattggttcacaagctggtttagctagagcattaatggaaaaattcccggacaagcgcatactttgtgctggggaaaacgatgaaggcgacttagcttggattaaccacatggatcaagtcaaggcaactgattacgaaggtgctttggtaattactactgataccgctaatacaccaagaatttctaataagttgtatgataagggtgactttttaattaagattgaccaccacccagatgttgatccatatgctgatatgagttacgtagatccagatgctccagcagcatgccaaatcattgtagacttcttgaatgaagagggctttaagattaccaaggaagttgcttacccactttatgctggaattgtaggcgataccggtcgtttcatgtatccagaaacttcagagcatacttttaaggtggctgctcaattagcttctactggaattaacattactgaaatcgctcgtaatattgctgatgtaacttttgatgaggcaaaattgcaagccttggcaatggacaagatggaaattgatcccgttggtgcagcttttacaattttgatgcagtcagacttgaagaagttaggtttgactgatgatcaagcaaatgttgctgtatctactccaggacgtattaaagatgtgcttgcttggaatgtttttgttgaaaaaccagatggtactttccgcgtacattaccgttcaaagggccctgtaatcaatgaattagctgctaagcatgatggtggtggtcatgcattagctagtggtgctaacgctaaggatatggacgaagtaaagcaggtatttgcggaagtcgttgaagtaactaagaagtttaaagaagatcatgaataatatttttatagattcaagaattaaaccagctattcaggctggtttaaagaagatccattttgaaaagccaactaaggtgcaggagaaagttattcctgctatgttgtctgacttgagtgtagtagtgcaagcagcaaccggttcaggaaaaacgcatgcttatttagtaccaatttttaatgaaattgaagaagataaacgctatgttcaagcaatcgttactttgcctagtcgtgaattagccgatcagctttatcaagtagcacggcagctccgtgatgcggcagggatgcatttttcaattgcacatcttgcgggcagaactgatcgtgaacgtcaattagaaaagtatcaaaataatactccacaattggtgattgcaactccaggacgtttgttagactttgttcaaaagaaggtttttgcagttgatcaagtaaaaacttttgttatcgacgaagctgacatgaccttggacatgggctttttgaacgacattgatcaagttgctgctaaattgccgaaggatgtccaaattgctgccttttcagcaactattccagttaaattgtctaactttttacgcaaatatatggctcatcctgatgatatcgttattgataatcctagtgttattgcgccaacgattaaaaacgatttgcttgatattggctcaaaggatcgcaagaatgtcttgtacaaattgttaactatgggacaaccatatttggcgttggtttttgctaacactaagcaaaaggttgatgagttgactaattatttgcaagatcagggtttgaaggtagctaaaattcacggtggggtaactgaacgtgaaagaaagcgtactctgcgtcaggttgagcaaggacagtatcaatatgtggtagctagtgacctagctgctcgtggcttagatattgatggtgttagtctggttgtcaattatgaaataccacgtgatattgagtttgtaattcaccggattggtagaactggccgtaatggtttgtcaggtcacgccattactttgattcgtgaagaagaaatgaaccggattgaagacctagaaaaaatgggtgttcattttgactttgttgagattaagaatggtgaattagtgccacgtaaacactatcgcagtcgtgaaaatcgtcaaagcaagaatcgtaagcttgataccaagctggtgggttacgttaaaaaagagaagagaaagcgtaagccaggttacaagaagaagattaagcgtgcgattcaagaggataatcgtcaaaaacgtaagttggaacagcgtcatgaggttcgtaaggcaaaacgtttgagaaagcgcaagcgtgaacaagggctttgacagaagcggattttgtagtacaattatttcagcttaagatatgttttttgatcaattatttcaaagagagagccagttagatgagaatggcttaataatagtcaaaaaatgctcctttaagtttcataattaagaatatcaagaggtaacaaacactgttgcaatcaaggtggtaccgcgcgtggagcgtccttgaagaaagcaatagtgttttttatttatttttagggagatttattttaatgaagaaactaaatagttcagagtttcgccaaatgtttttagacttcttcaaggatcatggtcacatgattatgccaagtgcatcattaatcccacaagatgacccaactcttctttggattaactcaggtgttgctaccatgaagaagtactttgatggctcagttgtaccaaaaaatcacagaattacttcatctcaaaagtcaatcagaaccaacgatattgaaaatgttggtaagactgcacgtcaccaaactttctttgaaatgcttggtaacttctcagttggtgactactttagagatgaagctattccttgggcatgggaattcttaactagtcctgattggcttggcttgccaaaggaaaagctttactgtactgtttatccaaaagatgaagactcatttaatgtttgggtaaaggcagggatgccagctgatcatattgttaagttggaagataacttctgggatattggtgaaggtccatgtggtcctgatactgaaatcttctacgaccgtggtcaagaaaacaacgacgttgctgaagacgatccagaaaacttccctggtggtgaaaatgcacgttaccttgaaatttggaacatcgtattttcacaatacaaccacttgccaaatggcaaatatgtagaccaaccacacaagaatatcgatactgggatgggactagaacgtgtgctttctattttgcaagatgcaccaaccaactttgaaaccgacttgttcttgccaattattcacgccactgaagaaatgactgatgacaagaagtacggcgttaacaaggaagacactactgctttcaagattatcgctgaccacgttcgtgccgtaagttttgcgattgctgatggtgcgcttccttcaaactcgggccgtggttatgttcttcgtcgtttgatccgtcgcgcagacttgaatggtcaacgcttaggaattaagggtgccttcctttacaagttggttccagttgttggaaaaatcatggaaagtcactacccagaagttatggatcaacgcggctttatcgaaaacgttatccaaaacgaagaagaaagatttcaatcaactcttgatactggtttgactttgcttgacgacttaatcgacaaggcaaagaattctaaggataagaccatttcaggtaaagatgccttcaagatgttcgatacttacggcttcccatatgaattgacttttgaatcagcacaagatgctggccttaaggttgacaagaagggctttgatgcagaaatggctgctcaaaaagagcgtgcacgtaaagctcgtggtgaccttcaatcaatgggacgtcaagatgtaactttaatgaacattaaggataagtcagtctttgaacgtgatacttacgaagaaccacatgcaaagctagttgacattgttgttgatgataagttggttgataaggccgatggcgaacatgctactttggtctttgacaagactccattttacgcagaacgtggtggtcaagttgccgaccacggtgacatttacaaccaagacggtgaattggttgccaaggttactgacgtacaacacgctcctaatgaccaaaacttgcactttgttgatttgattttgccagttgaaaagggtcaagaatacgtattgaagttagataaggaacgtcgtgaagggttacgtcactctcactcagcaactcaccttcttcacgctgctcttcgtcaagtcttaggtgaacacactcaccaagctggttcattagttgatcctgactacttaagatttgactttactgcaatggaaccaatgaccaagcgtgagcttaagaccgttgaagaattggttaaccaaaagatttgggaagctattcaagttaagactactatcactacccctgaagagggtgaaaagatgggtgctttagccctctttgatagcaagtacggtgataaggttcgtgttgttcaaatgggtgacttctcaagtgaattctgtggtggtactcacgtggacaatactaaccaaattggaatcttcaagattacttcagaatcagctgtcggtgctggtatgcgtagaattgaagctgtaacttctaagaaggcttatgaatacttggcaaaccgttcagacttacttgatgatattcaagaagaagttaaggcaaccaagccagataacattgtcgataagattgattcacttgaaagtgatttgcacgatgctcaaaagcaagttgaaactttgaacaagaagatcaatgctgctaaggctggtcaaatctttaatgacgttaaacaagctggtgacttgactgtcattgctgctactgcagatgttaacgggatgaatgacttgcgtgaacttgctgataactggaagagcggcaacaagtctgatgttttagttttagctgctgaaaatgctggcaaggctaatatgattattgctttagaccaaaaggcattagacaagggccttaaagcaggtaacttaatcaagatcgctgccccaatctttggaggtggcggtggcggccgtccaaacatggctcaagccggtggtaagaatccagcaggcttgaatgatgctattaaggcagttattgacgaaatttctaagaactaagaattaattaattgtgtttaagctttttttcaagtaaaattgttgacaggaggaataaatatgagttcgctagataagactatgcattttgactttaatcagaacaaaggaaaaaatgtttatgatactctgcaagatgtttacaatgcgcttgaagaaaagggctataatcctattaaccagattgtaggttacttactttctggcgatcctgcttatattccacggcataacgatgcccgtaatttgattcttaagcacgaacgtgacgagattattgaagaacttgttaagagttatcttggtaagaataaataatgcgtttattaggtttagatgtaggttctaaaactgtgggagtagcaattagcgatgagctaggaattactgcccagaagttggagactatccagattgatgaaagcagatataactttggtatgcgtccattgaagaagctagtcagacagtatgaagttgacggtttcgtattaggtttacctaagaatatggatggtacttctggtagttccgtagctagaagtaaggcatacggcaaacgactagaggaaaagtttggtttacctgtacattattctgatgagagattgacaacaattgaatcacgacgagtacttgttgaggatgcagggatccatgatcgcaagaagcgtaaacaagtaattgatcagatggcagcggtgctcatcttgcaaaattatttagatttacaccgaaaggattaaaatggcagcacaagttaatggtgacgatcaagatcgtcaaattactttgattgatgatcaaggtaatgaagaattgtatgagatattatttacttttcattcagatgattatgacaaatcttacgtgcttctttatccagccgctgttggcgatgatgaagatattgaggtgcaagctttcagttatgatgccgatgatgccggcgatgtaacaagtagtgatttgcatgagattgaatctgatgatgagtgggacatggtccagggagttttaaatactttcttagatgatgaccgcttgagtggtaaataataaaaagaggactggctgtggctggtcctttttgttagttttagaaaaaagataaaaatgaacaagaaaatattagagattttagaatttggcgaaattactaagcgcttgagtaaattagcgattactggtcccgctaaaaaagaagcggaggaattattacctagtggtgattttgaacaagtacaaaatgagttaaagcagactttagctttgactaatttgctacgaattaagggacaacttcctttaacggactttcaggacgtacgtccaagtactaaacgtttaagcgtgaaagctaatttaaatgctaaggaattaggtaatttattattagtattaagtttagctcatgaaattaatgactttttggcagaaatagatccaaacaaactggatttaactgcaattgatgaaattttagatcaattagatgtgccggatcttttatttagagaattaaagaaatcagttgattatgatggtgaggtattagatacagcctcacatgaactagctcgtttgcgtcatgatatacgttctaatgaagaggaaattaagaataagatggatgcttatactaagggcaatagtagtaagtatttatctgagcaaattgtgactattcgtgatgatcgctatgttattccagttaagcaagaatatcgggcaaaatttggtggggtagttcatgatcaaagtgccagtggtcaaacactgtttatagagccggaagccgttttaaatcttaataaccgccaacagaatttaattgctcaagaaaaacaagaaattcgtaatattttgaagcacttatctaatttggctcgtgaagaaattactagtttgaataatattgcggctgcattaactgaactagatttcttgcaggctaaagccaagttagcaaaagaaatgaaggcaagtgagcctcgtctgacacaagaccattctttgaacttattaaaagcgcgtcacccattgattgacccagaaaaggtagtacctaatgacattcgtttaggtggtgaatttgatactatgctgatcacggggcctaacaccggtggtaagacaattaccttaaaaacagcaggattgcttcaattgatggcacagtctggattatttatcccggctgaagaaggtagcaaggttggcgtctttaagcaagtttatgctgatattggcgatgaacagtcaattgaacaatcgttaagtactttttcatcacatatcaatgacattattgcgatcatgaagaatgttgattctgagaccttagttttaattgatgaaattggtgcagggactgatccagaagagggtgctagtttggcaattagtatcttagactttttgcgtaaaaaagatgctaagatcatggtgacaacgcactatcctgaattgaagctttatggttataatcggccacggacgactaatgcctcaatggaatttgacttaaagaccttgtcgccaacttatcatttgcagattggtattcctggtcatagtaatgcctttgccattgcccgcaagctagggatgcgtgaagatgttgtcaaaaatgcccagaacttaatgtcagatgaagattctgatattaataagatgatcaccaagttgaatacgcaaaccaaggcagctactgtggctcgcaatcgtctgcaaaccagtttggatcggagccaaaaattggagcaaaagttgcaacaagcacttgattggtataaccaacgtgtacaaaaacagcttgattttgcacaagagcgagctaatgaagttgttgccaaacgccgtaaaaaagctgatgagattattgctcaacttgaaaaacaaaagaacatgggcgtcaaggaaaataagattattgaagctaaaggcgaactcaacagtttagagcgtcaggctaataatttggctcataataaggtcttacagcgtgaaaaacgtcgtcaccatgtaagtgtaggcgatcgagtaaaggtcctctcatatggtcagacaggtacgattactaagaagttatctgaacatgaatatgaggttcagatgggaattatcaaagttaaggttagtgatcgcgatattgagaggattgaaaagggcgaaagtactaagcctagacaaactgttagagcaaccagtgcggttagaagaagtaatgctcatagcgagctggatttgcgaggccaacgctatgatgaagcaatgactaatttggaccgatatattgattctgttttactggcaggacttgatacggttacgattattcacggtattggtactggtgcgattagaaaaggtgtttggcaatatctccgcagcagcaatcatgtaaagaactttaattatgcaccagctaatgaaggtggcaatggtgcaacaattgtacaattaaagtaagcgtcttacttgcaaaaagtaagtataatagaatatacttataatataaataaatgaattgaaaaaatgtgaggtaataattatggttgaagcaattaatgatcaaaattttgaagaagaaactaagaatggtgtagcattagtagacttttgggcaacttggtgtggtccatgtaagatgcaatcaccagtaattgatcaattatctgaagaacgtcaagacgttaacttctacaagatggatgttgaccaaaatcaagatacagctaagaatttgggtattatggctattcctactttaatcgtaaagaaggatggcaatattgtagaccgaattactggttacactccaaaggaaaagttaaaccaaattttggatcaatatactgattaatttaaaaatcaaaaaaagcttgagacgatgttgccaatgtcattaagttaagacattgacaattaagggtgcttttttagagatcgaatcatttggattcgatctctttttttgtataaaataaaggcgaaaagaccagccttttcgcctatcttatatattatatattttaaaccttcaaaattattgccagaaagatggtgttaattatgaaagcccttcataagaatattctagaacgtcttgatcaaattatcaataatactggggatcatattcacgattttattaataatcctcatgcttttaccaggaaacgcactttagatgcagcgacagtccttaaaactacaattaacatgcaaggtcagaatttaaacagtgaactctttagagcttttggcgaagatgcaactaaaaagaacgataaagtagttagtacttctgcctatgttcaacgcaaaagccagctttctcctgcttgttttaaacatattctgactgtttttaatcaaaatctatttaatattcaactttttgatcatcactaccgtttgtttgccattgatggctctgactttaatcaaatctggaatccgaaatcgaataacattgtacaagcttcttctcataaaaagaaaccctattgtcaaattcacgttaatgccttatatgatctattgaataatacctaccaggattgtatttttcagcctaaatcagaaatggatgaacgcaaagcggctgttcaaatgcttaaagctttgaattgtggtccatatattgtaacaatggatcgtggctacactagtttcaatatgattgaaaactgcaatcgcctgcctaactgtcattacataatacgaactaaggctggacaaggcggagttaaagaaataacgacattgcctgatcaagaatgtgatcgtgagatttcctgcctggtaactacttctaactattactacatcacgcataaagccagtgagaatattcaccatgtccagcatcattatcgccaatatattaagtatcgctctaaaaatacccaggatctaagctgggattttggcgagttatgcacaataaaatttcgagcctgcaaatttagaattaatgatgccaaatcaggcaaagaagaatgggaagttgtgctaaccaatcttgatcgaaaaaattatccgctaaaaagaattaaagagctttatcatctgcgttggggtattgagacctccttcaagaaattgaagtattctttaggcagtgtacagttccattccaaacaagataaatttattgaaatggaaatttatgcccatatgattatgtttaatgcaatcagtcaaattgatgcacaggcctatattccgcaaaagcattgcaagtatcaatatgccatcaatttcaagcaatcatgcttgattattcagagcatgtatttggcttcttctttaacgcaagattttgaacggatccttattcagatcagctattataccattccaattagaccaggccgcaaggacaagagaaatattaagcccaaatcagctgtatattatttatatcgcgtagcttaaaaaagcagaatctgtgctatgccttatttgttgtacgaaaaaagcaccaatttaaccaattaaatgttaaatcagtgctttaaaagtctaatattaattgtcaatgtcttaacttaatgacattgcgatgttgcctcaagcttttttgatatatcacttattttgatttacttgcttttttagcaagtcacgaatttcttctaaatagtcggcctcagttggaccagcttctttttctttcttgggcattactctatttaaagccttgatcattaaaaataccacaaatgaaatgatcaagaagttaatgacagaattgatgaagctgccatatttaaatgtagcatccccaaccttaaaaacgaggttagaaaaatcaattttgccggcaaagatcccaagtagggggttgatcaagttttttactaaagattgtacgatagcagtgaaggcagcaccgatgattacaccaactgccatgtccattacattgccacgtgaaataaactctttaaattctttaatcatgctctactcctatatctaatatatctaaaaaaatgcgattttaactaaagtatatagtagtggttatttatagtctatcaatttgcttttaaccgaagcgagcgataaattgaactttcttttctttatctaaaatattaatttcacattcggtggttcgaccagttgatttttgaaatgcttccgcgatcattccgccttcaagggagaattccttgctggcgctattcaaacgatcagtgacagtttggccacttaattcgtaagtagtaaatgatcgtctttctttaactttttctagcttaccaaattcagccatgttgaagaattcaactaaatcatcataatcacttaaatcatattttcgcgcgattctcttgccagcccaataaagaattgaggcgtcatcatcgcctaaaatagttggcaaaaggaaatcgcggtaaagttggttaataaaatatacgtgctcgtttgtgttttctgtgttttctgtcataaacttgttcatcccttttattcttttttattttaccgtaaactagtataagtagaaaataaatttttgattttaagagggttttattatggataatcgtccgattggattattggattcagggctaggtggcctatctgttgcaaaaaaagtaattgaaaaattgcctaatgaatcaactgtttttattggtgataacgctcatatgccgtatggcgatcgaactaaagaagagattattgaactagttagaaaatcagtccattttttgttagataaaaatgttaagctgataatttttgcctgcaatactgcgacagcaatggctatgagtacgattcaagcagaaatcgatccacaaattatcggagttattcagtcggggagtttggccgcttcacggacaactaagaataaaaaagttgcggtagtttcaactaaagcaacagcagaatcacatgcttatgctaaagagatccgtttccgtgatccagaaattcaggtaacggaattagctgctcctaaacttgcaccacttgtggaggctcaaaaagatcatgaaaccaacttaaaagtagttaaagagagtttgacccccttacaaggaaaagactttgacactttaattatgggctgtacgcattatccattgattcagaaagaatttaaagaagcaattaatgataaaaatgttactatcttggatcctgcagatcaagttgcacagtatacgtttaatgtgatgcggcgcgatggtttgtttagtgatggtaatgaaaaagtcagtcatgaatattacactacaggcgatccaactagttttgatcatttagcaaggacattcatggatgatgcaactttaacatctaagcatgtggatacggagaatgaataatggttaaagaaattttatttgcgactggtaatcaaggtaaagcaaaagaactaaaagaagcctttaaacaagctggggtagatatcgagattaagacgaatgctgacttagacaatccgcctcatccgattgaaagtggccatacgtttgaagctaatgccaagattaaggcccatgaattagctgagtttagcaagttgcctacgattgccgatgattcaggtttaatggttgatgccttaaatggggagcctggtgttagaagtgcacggtatgcaggcgaagctcacaatgacgcaaagaacaacgccaagttattagctgaattaggcggtgtaccggatgaaaaaagaacggctaaattttggactacgattgtagtttcgatgccaggtgaatttgataaagacttggttgtgtcaggtacttgcagtggtcgtattttggccgcaccacgtggtgaagatggttttgggtatgatccattgttttatattccagaaaaagaaaaaacttttgcacagatgactactgatgaaaagaatgagatttctcatcgtggtaatgcagtgcgaaaattgctccaagaattgccagcttggttagaacaatttgattaaggtaaaaatagctcagttcgggtcattcgtatgatttgaactgagttatttttagtgaaatgaggtggatatatatgtcaaaaagtattggggaagcgctgaaagaggaaagacggtctttaggattaacacaggaacaatttattaaagggattattagtgaatcgttttattcaaaagtaggacgaggtaagaatgaaatagtagcagtagatttactaaagattttagctgctaataacattagtgaagaagaatttttaaataaactaaatgttaaggaaaataataatttagaggaagacttaaaagttcaattacttaatgcatattctattcatgataaaaagaaaatcagtatgttagtcccaaaaatacaaaatgcagctatggatgaaaatactaaaatatcagctcgtttgattgatgcagttgtaaataataagattaatgatttaactcaaagagaaattacacaaattaagagaaaattttttgaagttgatgattggaccaaaaatattacaaccttacaacttttttgtaattcaatgcttttgtttgattttgatgagctggttctttttgtaaaaaaactggaaaaaacatgtaaagggaagttgatgaaattaccatttaatactcaaaagataattgcatcgatttgcataaattattttcataattgttatacaaatgattgtagtcgaaactgtcaaatcgaaactgtcaaatcttttgtgtaaatagttctttctcgtaaattgattttttaattatttatttaatcaaagtaggattctaaggtgtcctgaacctgaccaaagcctttatgaattcgattgaaataacggtcattgtagctcattgcctgaataccaataaaagcatcaagcgactgttcagttggaaactctgccttaggcttagctttgcgcttgatcacattgttaaatgattcaatcatgttagtcgaataaattgaagctctgatctgcttgggatagttataaaagaccagcagatctggttctatgtctttcaagcttctgataacatggctgtaaaccttgccccatttggtatagaagtcatgcaggacagctgtggcttcttctttgtttgtctgttgatgcacctgtttgaattcgttcatgatcttttcacgatcgtcgacgcgtactttagcgcagatattgcgcatgacatgaaccaaacagcgttgaaaatgagctttaggataagtcctggccaaggctgttttcatgccaacaacaccatcagaaagaaagagttcaacttgcttcaagcctctggacttcatgttttgaagcatctctgtccagacttcaatgttctcactaggagcaatgcagtagtcaatgacttccttatgtccattaggtttaatgccaatggcaatatagactgcttcacgctcaacgctcaaacgtttctcggcgcaaaggaaggtatgtcgcatccaaatagacgcagaaaaacttgtcgcttagcttgcgtttgtggtaagcctcaacctttggaatcatctgcttggaaatatttgatacctgagctggactgtaatggctgccatacatcttttcaattagatcggctatttccctggtggtcacgcccttggagtaaagcttgataatcatgctttccaagatatccgagtgctgcttgtagtcaggcagcgtgtgctgatgaaattgaccgttgcgatcccgaggcacttgcacttcaattgggccaaattgcgtatcaactttgcggaaataagcaccatttctagagttgccagtattccagccatttctggcatagggatcatagcccagaaaggcagtcaattcagcttctagcaagttattaacagcctgttgtagttctttgcgcaataaatcatttattttgtctggattgaatagagcttgagcaaaatctttggtaaaatcattcatgaaggagttcttctttctgtatgtgtttttttgttcaaaccaatcatacgagaaaggaactcctttttctaatgtttaaagaaataaatttaaggaatcattcatccttacacaaactattttacagtctcaagatgcaagctatggttatgaaataatagaagaattagctaatattccggattttggaatatatgtgatagttactaatttttataaggcatattttcaaggcaataaaaagcaaagtcaacagatattagatttcttgaatcagaatggactaaacgaaatatctagcagattgccatagtcatatatgaagacttaattcaaatatgaagagtattagatttttttaatgtttatactataattttaataattaatgtaactcttaggattagcctaagggttattttagtaacaaaattatttatgtggagaaagaaaaatgagatcgcaatatttccaagccacttttcgaattgcacgtaagtcgaaaaagaatatgttgcttgctgttttattggtactttgcatgatttttgctgtactggttgtagaaaagcagaaaatcaacgatggctaccgtcaatggcgagactacaatgagtcagttcatgttaatgcagattatttttctagcaatttgctacgaaaaaaggattacaaacaaacttttaataatctgaataaacaggctgagtatttggccggtgtacaaaatggtgaagtatttgattcgcctcaagattatttgcaaaattccaaaaagttagtgcaaacgatgctggcgggttatcaaaataattatcgcggtgcttcaacgctaaatgttccaccgaagtatcaactgcaacaaaaattagtagtttatgattatttgtaccaacatcacttagcaattgtcatgaattctaaagaatctagcacctacttaatctatattttaggattagtcggcatgttcttatttttctacgttttatttattgctagtgatagctggatgattaatttatcacatccaactctgcttaaaaatattccttatcagattagggatgaagttgaaggcaaatttatcatcaatcttgctttgactttgcttccgttagtgattggtgtgttaggaagttacttatttgctggttttaagaatggctttaatagtttgaattatccagcagttttgtatttcggtaaaattagcgcggttccactgtggctttattgtttgttgtatttagtctatgcagttgtactagtgatgtttgtgactagcctggcattgttgcttaatcaattaactcatagcgtttatctaacgatttttattgcggcattggtctacagtatttcacttttaccgggtagcattgctaaatatcttttctttttaccttcagcttatctaaatatcagtaaggttttagatgggactgttgcaagtcaatcaattattccggcaaattgggcagttggtatgactattttactagtgtgggctgtagtgctggtaatctggttcaggcatttggttaaccaaggtggtgttgaaaaatgaaaaggcaatattttttatttcaattaaaaatatttttgactaatcctaaaaatgtggggctgtttttcattaccgtcgtgcttgcactttactttggtttagtcagcgcaccgcagcatcatgtgattgaagatgttgatccatatgcaatttcaaaagaatatcaagatgatcaagcctttttaaaggtggctgaaaaagaatttgcacgggcagataaaggtacttcggattatgatcccagtgaaggtgctaaagatgctgttaccacatatccgaccatcattaagtatgaccatgagcgtttaaaagcacttaagaatcatgattggcgtttgtataccaaatacagtagcaagtggtatcagaaaatggataatttgatttgggttaaagaaaatcagaattacatgtatcccttggaatactaccacaataataattacaaagaagatggacattttgggtatcaaagaacatttcacttctatgatggtttacttaaaagtaaagcaaaattagacaaaaatgttttagaagaacggactactttacagagattacagcagtcgctttctgggtggacgatgattattttaattgtgattgttgttttgtttgcggcagatatgataaccaatgatcaaaaataccgtacagtagtgaagaatattcctctttctaaaaggacaattctttggctaaaaactgcggttattgaagtgggaattttatttaactttctagttgcttttttagtcgttacgttgtgtactgcgccaaggtatggttttggctcctttaatttattaacgccaatttatactggtcgtctgtatttcaaaacgccctttgtttatcagacgctgggacaatattatcttggtttcttgatctttgcagttgtaattacctttattttcattagattgactttattattgtcgctgatttttagaaatgaatatgtagcggctattatttcaagtgttttggcaatgagtgctaaagttctttatttttcattgggtatgggctttgtttatccatttttgaaacacttaccaatgacatattttacaatcggcgaaagtttgactagtaatttatcgtatttaatggactcaccaggttgggactttaatgatgggattattccgttagttacattagcaattgtaattgaattaactatttggctattttgtcagtttagaaaagtagtattagtgaagtaggtgaaaacatgttaaaaattcataatgttaaattagcttttggcgaacatgttgtcttagatgaaattagtttaaattttcaaataggaactatcgtaggtttagttgcaccaaatggtacaggaaaatccacactactaaacgtaattttacataatcttgagccacaagctggttatgtagaatatgatcatttacgttatcgcagcaatcgtgagattattaaactgcatcgactgatttgtgcttttcctgatcaaagtgatctgtttccatttatgagcggtagggatcatttaaagctttatgcggatctttggaaaaattcggataaaaatgtagataatattattaataaattacagatggaaaaatatgttgatcgcccaacacaaacttattctttggggatgaaacaacggctttgttttgccatggtggttgcagctgatacgccagtaatgcttttagatgaggtgatgaacggacttgatccccaaaacgtacaattgatttcagattacttattagatctaaaaaaagaaaataaattgattattatggcttcacatttgttaaataatctacaatcttacgcagatcgtgtacttttcttgaaggcaggaaaggtaattgaagatctcgataatcaacatcaggctaagcagtatctgaaaattgaggcgaatgcaatagccgggacgcggttaaaagataaaagatttactaagttacctgataataaaattattgtgccactggatgataatctaggattagatcaacttatacttaaattgactaaagagaagattccatattcagttggtcgaattgatttggcagaattatttagtaaattttatggctaaggcaatttgattagataaaaatagctcagttcgggtcattcgtatgatttgaactgagttactttttacttattttgcagtagtttttgcaggtcgttctgtacttgcaaaagcaatattattttctcgtaaaatttgaatatattgggtcaaatacaaatttttcacagcagattgtttaccaggcttaacttgaaaatgaatggaataaacaaattttttccctgtttgttcggtcacaccgacaatagtaggacctgatacaattgtctttttctcaggctggatcttacgattgcattctttgattaacttgttaacttcatcaatatcgtttttggtatcaagatccaaattaatgtctagtgctacaccgccatgggctaggttttgcacaatggtaatgttgcggttagggatgaaaataattgagccatctgaacccttgagacgagtagttctgaggcctagttgcacgacggtaccaacattagtgccaatctgaactaaatctccaacatcaaattggtcttcacttagaataaagaaaccgttgaccaaatcactaacaaagccttgtgcgcccattcctaaagctagggaaaaaattccagcactggctaacaaggtgccaactggtacacctagaatagagagaataccgaataaatagaagaagataagggtatattgaaaaacgctgttaatcaaagctgtgatagttcgagttcttttattcttaactgtgttatgcttggctaagtaattattaattattttatgaccaaaatgggataaaaggtaaaaaatgagtgaagtaatagctaattgccaaataattgacaataaattttggctaattttactccaatcaatttcaattttctgtatatttatgtgagtaggaatcttcatttggtgtcctttctattgcttacgggtataattaagaataacaagacattaattgagaataaaggatattcatgctaaactttttttagatgttgatggaggtagaaaatgacaatttcttatggtgctttagcaggcttaattgcggcgattgcattcttaattttagtattatttacgattccaatgctaattcggaccgcgaagttgttgaaagaaactagtgcaactattcaaacaactaacgagtcaatgaagaaaatttctgaagatatggatggcttgatggatcaaacttcggatttgttagataaaactaatgacctaatgaccgatgttaatggtaaaatgaagacgttagatccagttgttaaagctgctgcagatttaggcgaaagcgtatcagaattaaacgattcatctaaaaagatcgctaaacgctttagcagcaatcatttaagccgtacgggtcttatttcttcaatagctgcgacggcatttgcaagacgcaagcgtcgcagaggtgaaaattaataaaggaggaattcaccatgaaaaaattcgcaagtttcttattaggtgccgttgcaggatgtgcagcaggttttctcgcaggttcacttcttgttagtgatgaacaagttgatgacgttaagaacaagattaaagataatgacaagcttcaagatttgaagaagaaatacgataatggtactgaaatcgttaagaatcaattagcatcattccctaagaatgttgaagatgattcagaattgaaggattttgacgacatcgtaatcgatgactcaaataaagatgacgatgacagtgaaaatgctgaagagtcagttaacgatttgaacaatgctgaaaaagatgatactgatgcagcatctacttcagaaaaaccacaagcttaattaaagtcaaaaagaaaaggagctggtcgtgatgatcaatgtcattaagttaagacattgacaaattatcgacttggacttttaagatcattcatttgcgatttatcgcatttgaatgctcttttttcatgccaaataaacccaaatcttgtttagaaattaggctacacgatataaataatatacagctgatttgggtttgagatttcttttgtcttttcgtcctggtctgatcggaattgtgtaatgactaatttgaataagaatctttttaaagatttcagttgaagaagaaattatatacatagcctggatgacaaaacatgactgtttgaaattgatcgcatattgatacttgcattttttttgtggtacatatgcttgagcatcaatttgactgactgcgttaaacataatcatgtgggcatagatctccatttcaataaatctatcctgcttggaatgaaactgtacgctacctaaagcatatttcaactttttgaatgaagtttcaatgccccagcgcaaatggtagatttctttgatcctttttaagggataatcggctctatttagattagttagaacaacttcccattcttctttgcctgatttaggatcattaattctaaatttacaggcacgaaattttattgtacataactctccaaagtcccagctgccatctttggtatttttagaccgatattttatatattgacggtaatgatggttaaccaaatgaacgttttctgtagccttatgggtttcataataataattagaggtagtcacccagcaagctatatccttatcacactcttgattaggcaactcagctacttccttaaatgcgccatatcccgttttagtacgtatgacataataacagttaggcaggcgattacaattttcaatcatgttaaagccggtataacctcgatccatagtaactatatatggtccgcaatttagctttttaagcatttgaacggcggctttacgttcatccatctttgacttaggctgaaagatgcagtcttgataagtattatttaacaggtcatagagtgcattaacatgaatttggcaatatggctttcctttatgattgagatttccaacgatattctctgatttaggattccagatttgattaaaatcagacccatcaatggcaaatatacgatatttatgatcaaataactggatattaaataaattctgattaaatacagttagaatatgcttaaaacatgcgggtgaaagctgacctttgcgttggacataagcggaagtactgactactttatcgttatttttaatagctttttggccaaaagctctaaacaactcactggtcaaatcttttccttgcatattaatagtagttttaatgactgtagctgcatctaaaaaccgcttcctagtgaaggcatgaggatcatcgataaaatcatgaatatgctttccagtatcattgataatttgatcaagacgatctaaaatatttctgtgaagggctttcataattaacaccagctttctggcaataattttgaaggtttaataatttaatcagagggcgaaaaggtaggttcttttcgcctttattttatgcaaaaaaagaaccaaatcataatgattcggttctacagagattagattcaatttgtcaatgtcttaacttaatgacattgtcgtgatgatcagctccttttttatgactaaaattagtctttaagtggtaaaacttttaagtctttgtcagtgtgagtaaaggtttcaaagccgtccttagtaacgacaccacaatcttcaattctgacaccagcaaagccagggatgtagatacctggttcaatggagaagcacattccttcttcaagaactaagtcgttaccttgtacgattgatggatattcatgaacgtttttaccaatgccgtgacctaggcggtgaatgaagtattcaccatagccagccttagtaatgatgtcacgagccacgctatctaattcttcagcggtgattcctggcttagcagcttcgattgcggcttgttgagcttcacgatcaacttcataaatttcgcgttgcttagcagtaggttcaccgtaagcaacagttcgactagaatctgatgcgtaaccatcgtgcatggtacctaagtcgaataaaactaattcatttggttgaacagtgttcatagttggaccaaggtgaggattagcggcgtttttaccagcttgtacgatggtttcaaaactttcatgcataacacctttttgaatttttagttggtaatcaatttgaccagcgatgcttctttcggtgacgccagttctaattgcgtcaaagccaatcttaaaagcgaagtctgcttctgcaccagcgccttgcaacttcttgatttcttcaggtgtcttgtaaagacgaattttttcaataaaaggtgaaacatcattagtaaaactagcgttaggaaattcaccacgtaagagttggtagtgggcaacagacaaatcatctttttcaattgcccaattatgggtatcgtgagttctctttttgacattagttgcgatgatgctccaaggattctcggaatcaagatagccgataacatcgccatcccatgcagatgcttttgcttcttctacgtttaaagctgggcagaaaataaatggttccgcatcttttaaaacaattaaagcaaagattctctcatgtggttccattgagtaaccagtaaagtaggaaatggtgattggattagaaatgtaagcaagatcattattggagtcttgcaaccattgttgtaatttatctaagttcatattgtcctcttttcttgcaaattatgtttactgtagtatatcatgatctcttaatgaaaaaatgaaagaaaagctgtaaacgtttgcattttatgcagcatcgtgatatctttaagtgaaggattttttggaaggactgagagataagagatgcataaacaagaagttacaatctatgacgtcgctcgggaagctaaggtttcaatggctacggtttctcgtgttgtgaatggtaatagtaatgttagaaaagagacacgtgaccgtgttctcgaagttattaaaagactgcactatcaaccaaacgctgtagctcaaggtttagcttctaagcggactactacagtagggttaattgtcccagatttaactaatttatactttgcagaattatctaagggtattgatgatattgcacttttatataaatacaacatcattattactagtattgaaaaccgcttgatgaaggaagaccaagttattcaaagtttgctgaataagcaagttgacggtgtaatttatatgtctaaccgtttatcagatgcagcagctgatgcctttaagcggactgatactcctgtggttttagcaggtactaaagacaatcgtgatgattttgcttctgtcacaattgactataagaaggctgatactgaagcattaaatttgatgtaccatgatggtaagaagcatttgggaatcgtagttggtgatcaagatgctgtagttaacagcgaaaacagaatccctgcttatgaagaattcatggaagaaaatgatttgggcactcctcgaatctatactgatattaaagactattcagatggttataatttatacccacaattagttaaagatggcgttgatggtgtaattgttactcgcgatatttcatcagttggtattttgaattctgcgatggatgcaggtaagaaagtgccagaagatttggaaatcgtgaccgccagtgctacgcagttagcttctgttgttcgtccagctttgactacgattaagcagccactttatgatatgggtgccgtagcaatgagaatgttgactaagttgatgaacaatgaagaagtagatgatactcatattgttttaccatatgaattagttaaaaagcaaagtactttaaatcaataattaagtgaagcaaaaaagaccagtttactggtctttttgttttagtagataattttgttaatctgttgaagcttttgtgtaaaagtggttggtgcaattgcttgattaggattatagggcaaaagcacgagattagtgtactgactgacccgtggtaaggactgataatctctgaaatcgtcttgactaaagaagccatagaacaagatatcttttgccttaacccaacctagtttggtataaatccacatgtttttaggactaccattaaaattttgaatttttaataattgatttgcgggtaatttttgctgcgttttggcttggttatcaggataacgataaattgtaactttttggttaggtttagcgataattttcttattttgataaggagcaatatctcgctttgttaagtcaaaattaacgaattctgccgaaataaaagttttttcagcaatttgataaaataagcgatcatctacacggacgccataagtgacattgactttttgacctggttgcacgtacttcttttctttgatgcgaacatacggattcatcattgtagcggctttagttttaccaaaataaattccagttctattaatagcgtactttttagtgccacttttggctaatttatatttaaaaccagtagcgggatagttggtaaccacgccatcaacattccgattaattagccaatgccatagggcaggcgattcgtccatttcggcccagacaaacagttgcttatgtaatttgtgaagccagtgaattaaaaagggatgctcttgcacaatgtcagaagaagcattgatagcattaacttgaggtaaattactgaaattaatgcgtttcaggctaccaacgatcaaaattagataagcttcaggcataatttttctaaagtgaaagagactagcagcggaaaatgaatgaatcatgattcttttctgcatatggtattttttaactatttgtgcgattttatcctctaactcataggacggatttaatccatgatcaattttagtctctaagacaaatttagtgtttggtttattttgataatgcttaaaaagctcactgagtgacataacgtgttcgccattgtcatattgcagttgtttaagtgctgtaaaattattttgtgatacaattgcatgtgtatgagtaactcggaagaggtcatcatcatgtgcaatgaccggaactccatcctttgagagctggagatcgagttcaacgtaatcagcaccagaattaaaggcggaatcgtcagcctgaattgtttcttcaggatatttgatgggatcaccacggtgccctacaactgtaaaaccactatttatgaaaaagactaagctaaaaaaaagaacccaaacgagtcggcttttaaatttcatgtgtacacctctatcgcatacttaacaatagcatggttacacatttttttctatttatagtactattcttttatcagtaatcggtatgattgaaatctaaaggatgagatttaatggaacaattggacttaattgaagaagttaccagaaatgatggcagtcgatattatgaaatctctaatattgaccaaaatggaattgcagaattagctgcagatcatggcttaattaaaaaagtcaaaatactgcagctgaatattcctcgaactaaggcactgattgcttatgaaaaatatatcaatgatacttatgacttgcagactttgactaatgaaagtgattggaaaaatccaaaatgggtagaatgggataaacctaagggaaaaattttagacgcatataatatgatcttaaaagccaatcgaattggttagaaagtggcataaaaaatggaacaactgcgaattttacataccaatgatcttcattcacattttgaacatttccctaaaatcggacgttacttgaaaaaagcgcaggctgatcaatcggttgatggtatctacacttttgatgcaggagactttatggatcggtctcatcctttaactgatgctacggaaggtcaagccaacatcaaattgatgaatgggtttaactatgatgcaattacgattggcaataatgagggaatttctaatccacattgggtattggaacatttatttgatcatgcggactttccgacagttttagcaaatttgcgtgaagaagatgaatcaatgcctaaatgggcagtcggccatatgtttttaactactaagaaaaagacgcgaattgctttaattggcctgactgcagcttatccaatgacttatggtcctaatcattggcatgtcaagatgttaggtgacagtatggatcacgaattagctcaaattgaaggaaagtatgatgtcttaattttattgactcatgttggattaaaaatggatcgctggttagctaaacattatcctcaaattaatttaattgtaggaggccacagccatgatctgattgaacatggtgaaaaagtggggcatacttggattacgcaaacaggtaaatggggaaactatgtgggtgatattcatctagaacttgaagatcatcacgtgattaaggtagtacctcgcactatttctactgcttcgatgccagaagaaccggaagataaggcagtgattcagggctactatgatgaaggtaagcgacttttatcagaacgaaaagtggctaatttacctgaaaaatttgcggatgataaagtagcagccgttcaagtttctcttgatgcgattgctgattttgctaaaacagatttagccattttaagctcaggcctattcttgcccccgtttaagagtggaataattactcaatatgatttacaaaatgccttaccgcatccaatgcacgttgttcgttcaaccttgaaaggttatgatttgtggcgactagtgatggaaattgaaaagaatcggcattacctagaccattttccactgcaagggatgagttttcgaggaaaaatttttggtcagatgtattacaaagggatcaaggttgatatgcgtagacgtgtagtttacgtcaatgggcatgaaattgatccacaaaaagaatataaaattgcctgtttggatcattatgtcttagttccattttttccaactttggctattgtcggtgaaaatgagtttttattcccacaatttttacgtgaagttgttggtaaatatttggctgaaaaatatcctttaacagcgagaagtgaaaaagatgactgaagaaaataaatttgaacaagaacagccaattagacacccacttgctgacgtggtgcaagatggtaagagcattaagattggtgcgcagctttatagcatcattgtcaatgagcgagacgcacttgatttagaatctttgcgtaaaaaatatgatccttatcttgaccagtatgattatctggtgggggacgtttctagtgaacatttacgcttgaaaggcttttataaagacggtgctagaaccgcaattgataaaaaagaaatggcgatcgtggattatttaacggaatattgtaatcccggcggaccttattttatcttggaattaacgcatccagtacattattatcagcatcaacgtactaaaatacggcgatcacgtgaacgacgcgagcgcgattttggtaaaaatgagcgttatcatgcacgacgtcgaaattatcggaagaataaaaatgaaaataatccgtttaagaagcggcgtgttcatcaaactaaatttaagaaaaaaacaatcaattgcagtgaaaaaagaatttggacggcatcattcatttattattaaaaagagaaagggaaactagtgaaagattaccgggtatttttaattgacttagacggaactgtttatcgtggtaaggaaacagttgaatcaggagtaagatttgttcatcgtttggttcaagcagggaaagactatttgtttttaaccaacaatacgaccagaacaccgcaaatggtagttgataaactaaagggacacggtatcgaaactgatacggaccatgtttatacgccaagtatggccacagctagctatattttacaaagagaacacaaggaaaagatcggcttgtatattattgggcagattggtctctggcatgaattattgcaacatccagagtttgagcttaatgaagaaaatcccgattatgtaattgtcggtatggatacagatctgacttatcataaagtacgagtagcttcacgggcgattagacgtggagccacttttattgggactaatgccgatatgaatttaccagcagaggatgagctaattccaggcaatggttcacaatgtgcattcgttgctgcagcaagtggagtagagccactgtatattggtaagcctgaatcaattattgtaaaaatggctttggataaagttggctatagcaaagatgaggcacttttggtaggtgataattacgataccgatattaaagctggctttaatagtggagtagatcagttgttgactttgacaggtgtgacgaccaaagtggatattgcagataaacgtcaaccaacaattttagttaataacctagatgaatttgaattatgattactaaaaacaatattttttcgctgatttatcattttttgtttgctgtttctagcagtgtaattggggcaattgtggctagttggccattattgtttatttttatgatcgtacaaaagacatatgagacggttcacatgtctttgtttaaggtaatgcataattataaccagctgatgttttatttgctctggccctttaaaaagcagcttaaaatggataatttccctacatctgctaatgcggcagaacattttgcggaatgtaagcatttatttattctgactctattagtttttattatctgcatcatagtgcactttgtttttaaacgacaaaagaaaaagctactgcttaatttggataaatcagtagcccttattttgctattattgccaattattatttttccatttgcagtaaccaatttcgacagtttctttgtgatttttcaccatattttgtttaacaatagtgattggctgtttgatcctaatactgacccaattatcaatgtgctaacggaaggcttctttgcttcttgttttgccgttgctggggttatttatgaattatattttgctgaaaaattattacgtaagtaaaaaagagttccttagtggaactcttttttgagtgatatttttttcttgattgcgacaattgcgattggcacaactgatactaaaatgatagcaattacgatcattgaaaaatggtcctttacaaatggaatattgccaaagaagaaaccgatgattgtgaacaatcctgtccaaagcaagccacccaagatgttgtaggtgataaatttaccataatgcatcttactgccgccggaaatgaatgggacaaaagtacgaataaatggtataaatctacctataacgatcgtaattggtccgtggcgctcaaagaacttttcagcggccaaccgattattttgattaattaatttattgaaccagctatgtttttcaccagctctggttgaccaggcaccaatttcatagttgatactgtcaccgattatggcggcgaatgctactataagataaactagccaaatatttaagccatacttaggattagcagccattgcactcgcagcaaaaatcaacgaatcgcctggaagaaatggaaaaacgactaagcctgtttcaataaaaatgatagcgaataagattaaataggaccaaccaccgaattggttaacaatcgggattaaatggtcatcaatgtgcaaaataaaatcgattaaactcatctggaactcctaaaaactagttgaatgaattgtcaaagttttttcagggaaaagatcacgcataatcgcggtgattgcaatctgggcttcgccaaaaccgagagcgattaaagggacgcgtccaagataggtaacaacatcgccagctgcataaacaccggcgatattagtttgcattgttgaattcaccttaatttgtgcgccagctaaatcgattccccattttttgacaaagcgattattagctttaaagccatatgcaacgactgcttggtctaacttgatattagttaagctatcttttcccatttcttttaaattaacgttcagttgattatcaaccaaattgatttgtttaggaagataaggagttaaaatttcaacattttttaaagacttaagttttttgacattagattcaagaccgcgaaattgattacggcgatgaatgattttgacattggcataattagctaattctagtgccaggtctaatgctgaatcgccgccaccaaagacgccaactgtttgtccgacaaattttgggggatctttaataaagtaatgaatccttttttgagtatcatcatccatagataatggtaaagctttaggtttaaaggcaccggcaccagtggtaatcaatatgctgcgggatgcaactatatcatcgataataaagccgtctttttgtttagtgacattttcaactttatggttagtaaaaatagttgtatccgttaaattatgtcgtaaattgtcgattagttcagttcctgtaatagagtcgtaagcaggaatatctttgattttcttaaaaggataaagcatttgtggctgtccgcctgtttcagataatgaatcaaacagtacggtcttgagtccatgaagatgggcaaatcgcgcggcaaataggccaacaggtccgccaccgataatagttaaatcaaattttttaattttaatgacctcctcaaagtagtgatgtatcaactttaacatgaattttgtaaatattcatttaaaaataagcttgtcaaaaaatgaattttaaggtatattattgaagtcgcctttttaagagcgagcataattctttattgaaaaaatacttgcaattaatattcaagtattatacattaataaagtcgcttcgagagatgcgacgagagcttaaaaacagacatgcaaggaaagaaaacaaataaaaagaaaaaagtacttgcaaagaagtaaataagctggtaatatatttaaatgtcgtcaggtgaaagcagaaaaagcttgagcaagacaaaaaaacaaatcaaaaaagttcttgacaaagaaatgatggtttgataaaatatgaaagctgtatgctttgcaaaaaagcaagacagaggtagtactttgaaaactgaacaaagtttcgctaaaagtgtgcgggtgtaaaaacccaaacaagaagcgaagtcaattcgcaagcaataaatttgagacaaagatcttaaataaggaatgagcaatcattcaaactttttaaaatgagagtttgatcctggctcaggacgaacgctggcggcgtgcctaatacatgcaagtcgagcgagcgaaactaacagatttacttcggtaatgacgttaggaaagcgagcggcggatgggtgagtaacacgtggggaacctgccccatagtctgggataccacttggaaacaggtgctaataccggataagaaagcagatcgcatgatcagcttttaaaaggcggcgtaagctgtcgctatgggatggccccgcggtgcattagctagttggtaaggtaaaggcttaccaaggcgatgatgcatagccgagttgagagactgatcggccacattgggactgagacacggcccaaactcctacgggaggcagcagtagggaatcttccacaatggacgcaagtctgatggagcaacgccgcgtgagtgaagaaggttttcggatcgtaaagctctgttgttggtgaagaaggatagaggtagtaactggcctttatttgacggtaatcaaccagaaagtcacggctaactacgtgccagcagccgcggtaatacgtaggtggcaagcgttgtccggatttattgggcgtaaagcgagcgcaggcggaagaataagtctgatgtgaaagccctcggcttaaccgaggaactgcatcggaaactgtttttcttgagtgcagaagaggagagtggaactccatgtgtagcggtggaatgcgtagatatatggaagaacaccagtggcgaaggcggctctctggtctgcaactgacgctgaggctcgaaagcatgggtagcgaacaggattagataccctggtagtccatgccgtaaacgatgagtgctaagtgttgggaggtttccgcctctcagtgctgcagctaacgcattaagcactccgcctggggagtacgaccgcaaggttgaaactcaaaggaattgacgggggcccgcacaagcggtggagcatgtggtttaattcgaagcaacgcgaagaaccttaccaggtcttgacatctagtgccatttgtagagatacaaagttcccttcggggacgctaagacaggtggtgcatggctgtcgtcagctcgtgtcgtgagatgttgggttaagtcccgcaacgagcgcaacccttgttattagttgccagcattaagttgggcactctaatgagactgccggtgacaaaccggaggaaggtggggatgacgtcaagtcatcatgccccttatgacctgggctacacacgtgctacaatgggcagtacaacgagaagcgagcctgcgaaggcaagcgaatctctgaaagctgttctcagttcggactgcagtctgcaactcgactgcacgaagctggaatcgctagtaatcgcggatcagcacgccgcggtgaatacgttcccgggccttgtacacaccgcccgtcacaccatgggagtctgcaatgcccaaagccggtggcctaaccttcgggaaggagccgtctaaggcagggcagatgactggggtgaagtcgtaacaaggtagccgtaggagaacctgcggctggatcacctcctttctaaggaagcgaaggatatggagagcaggaatgctaagagaagtatccagagcaagcggaagcacactgagaaactttgtttagttttgagggtagtacctcaaagatttgaaaaacgccaagcgttagtcgggcctatagctcagctggtttagagcgcacgcctgataagcgtgaggtcgatggttcaagtccatttaggcccattgacataacgaagaaaaagagttaaagttatgtctggccgaaaataaaatactctgggggcttagctcagttgggagagcacctgctttgcacgcaggaggtcatcggttcgaacccgttagcctccattgatccagaaaaaggatcaaagagctagtacattgaaaactgaatataatccaagcaaaaaaccgagacaatcaaagagaacagattgtagagcgaccgagaagagaattcttgagtaaggtcaagtagaaaagggcgcacggtgaatgcctaggcactaacagccgaagaaggacgtgacgaactacgaaaagcttcggggagcggtaagtacgcagtgatccggagatatccgaatgggggaacccaatgcagagatgcattattgattagtgaatagatagctaatcaaaggaagacgcagtgaactgaaacatctaagtagctgcaggaagagaaagaaagatcgatttccttagtagcggcgagcgaagaggaaagagcccaaaccaagtgatttatcatttggggttgtaggactgcgacgtggcagtgtaagagatagttgaattatctgggaaggtaagccagagagggtgagagccccgtaagcgaaatctcaagcacgcctagcagaatcctgagtaggccgggacacgaggaatcccggttgaaaccgcgaggaccatctcgcaaggctaaatactagttagtgaccgatagtgaaccagtaccgtgagggaaaggtgaaaagaaccccggaaggggagtgaaaaagaacctgaaaccgtgtgtctacaagtagtcaaagcacattaaagtgcaatggcgtgccttttgtagaatgaaccggcgagttacgttatctagcgaggttaagtcagaaaagacggagccggagcgaaagcgagtcttaatagggcgaaaagttaggtgacgtagacccgaaaccaagtgacctacccatgaccaggctgaaggtgtggtaaaacgcactggagggccgaacccacgtaagttaaaaattgcggggatgagttgtgggtagcggtgaaattccaaacgaacttggagatagctggttctctccgaaatagctttagggctagcctcgtggagaggataatggaggtagagctctgtttggactaggggcccgtcaggggttactgaatccagataaactacgaattccagatatccatacacgggagtcagactgcgagtgataagatccgtagtcgaaagggaaacagcccagatcaccagttaaggtccccaaatctatgctaagtggaaaaggatgtggagttgcgtagacaactaggacgttggctcagaagcagccatcattcaaagagtgcgtaatagctcactagtcgagtggcgctgcgccgaaaatttaccggggctaagcatagtaccgaaactgtggatgtgttttaaagagcacgtggtaggagagcgttctaagagcggagaagttgaatcgagaggatcaatggagcgcttagaagtgagaatgccggtatgagtagcgaaagataggtgagaatcctatccgccgaaagactaaggtttcctggggcaggctcgtccgcccagggtaagtcgggacctaaggcaaggccgagaggcgtagtcgatggataacaggtagagattcctgtactgtgtcaaatcgttaagagcgaaggagggacgcaggaggtgaagcacgcatcgcgatggaacgatgttcaagcaacaagtgcggttaagagtcaaatgcttctaaccagcaacacgagttgtgaagaggagtgaattaaaagtagcgaaggtgtggtaatcacactgccaagaaaagcttctagccagagatgacatacccgtaccgcaaaccgacacaggtagtcgagtggagaacactaaggtgagcgagagaactctcgttaaggaactcggcaaaatgaccccgtaacttcggaagaaggggtgctagccaagagattggttagccgcagtgaataggcccaaacaactgtttatcaaaaacacaggtctctgcaaaatcgtaagatgacgtatagaggctgacacctgcccggtgctggaaggttaagaggagagcttagcgtaagcgaaggtttgaattgaagccccagtaaacggcggccgtaactataacggtcctaaggtagcgaaattccttgtcgggtaagttccgacctgcacgaaaggtgtaatgatttgggcactgtctcaacgagagactcggtgaaattataatacccgtgaagatgcgggttacccgcgacaggacggaaagaccccatggagcttcactgtagcttgatattgagtatcttttaaacatgtacaggataggtaggagccagagaagataggacgctagtcttattggaggcaatgttgggatactacccttgtttgaaggatgctctaacctcgacctgtaagccaggccagggacagtgtcaggtgggcagtttgactggggcggtcgcctcctaaagtgtaacggaggcgctcaaaggttccctcagaatggttggaaatcattcgcagagtgtaaaggtataagggagcttgactgcgagagagacaactcgagcaggtaggaaactaggacttagtgatctggtggtaccgtatggaagggccatcactcaacggataaaagctaccctggggataacaggcttatctcccccaagagttcacatcgacggggaggtttggcacctcgatgtcggctcgtcgcatcctggggctgaagtcggtcccaagggttgggctgttcgcccattaaagcggcacgcgagctgggttcagaacgtcgtgagacagttcggtccctatccgtcgtgggcgtaggaaatttgagaggagctgtccttagtacgagaggaccgggatggacgcaccgctggtgtaccagttgttccgccaggagcatcgctgggtagctatgtgcggaagggataagcgctgaaagcatctaagtgcgaagcccccctcaagatgagatttcctttgcgtaagcagtaagacacctcagagacgatgaggtagataggctgggagtggaagtcctgtgaaggatggagcggaccagtactaatcagtcgaggacttgaccaaagcgaagcaaactggaaggttttttgcgagaaggattatgtttagttttgagtgtaaaagctcaaaagagtacggtggcgaaagcaagaaggatacacctgttcccatgccgaacacagaagttaagcttcttaacgccgaaagtagttggtgggcaactgcctgcgaggaaaggaagctgccgtgctcaatatggaggattagctcagctgggagagcatctgccttacaagcaggaggtcacaggttcgagccctgtatcctccatatcgagtcgttagctcagttggtagagcaacggacttttaatccgtgggtcgagggttcaagtccctcacggctcatgaccctatatatgcgggtgtggcggaattggcagacgcgctagatttaggttctagtgttttcggacgtgtgggttcaagtcccaccacccgtattgccaaccacatattgacaatatgccgatttagctcagttggtagagcatctgtcttgtaaacagggggtcgtacgttcaagtcgtataatcggcatttatattacgcggaagtagttcagtggtagaacatcaccttgccatggtgggggtcgcgggttcgaatcccgtcttccgctttcatcaacacgccggagtggcggaattggtagacgcacgggacttaaaatcccgcggttggtttcaaccgtatcggttcgactccgatccccggcattgatgatgcgcccttagcgcaactggatagagtgtctgactacgaatcagaaggttgaaggttcaaatccttcagggcgcatataacgggaaatggctcagtttggtagagcacctggtttgggaccagggggtcgcaggttcgaatcctgttttcccgattgtaatctaatggtgattggttacattttggcggtgtagctcagctggctagagcgtccggttcatacccgggaggtcgagggttcgatccccccgccgctataattgtaagcttggacctttagctcagttggttagagcagacggctcataaccgtcctgtcgtaggttcgagtcctacaaggtccataatatggcttttatattaatatcgcgggatggagcagtctggtagctcgtcgggctcataacccgaaggtcgttggttcaaatccagctcccgcaatttggtccattggagcagtggtttatctcgcctccctgtcacggaggagatcatgggttcaaatcccatatggaccgtaagatggctcggtagctcagtcggtagagcaaaggattgaagctccttgtgtcggcggttcgattccgtcccgcgccatttcattttatattaggtgcgggtatagtttagtggtaaaacgaaagccttccaagctttagtcgcgagtccgattctcgttacccgctttatatgggcctatagctcagctggtttagagcgcacgcctgataagcgtgaggtcgatggttcaagtccatttaggcccattggagacatactcaagtggctgaagaggcgcccctgctaagggtgtagatcgggttattccggtgcgagggttcgaatctctctgtctccgtattatacattttagagcagctaagaaccgcgtggttacgtggttcttttgttttactctcattttttgatagaaatttgatagaaaagatctttttaaaaaagcccattaatatctttccgaatttcttcctcaccatttttggttgtgtgagtataggtacctagcgttaaatctatgctcttatgtccaagcacatttttaacatctaccatgttccaaccattatcattagcaattgtagcaaaactatgacgcaatccatgaaccgtaatctttttaagatttgggttcttttcgtaaatttgctttttccacttgtcagccttactagagcggtaatagtcgcccttagtattgtgaaagacaagtgggtttagatctttacgacagtgaagcgaaacttcatatactaagtctgacataggaacgacacgggtttcatttcctttaggaatttgagtgccataatcattagtttctatttctccgttgcccttaattttgagcttgtaagctgttgttcgctgaatttgtatggttttattttcataattaaaatccgaccagtggagggcaatagcttcactcttacgaattcctgtagttgcgaggatcaagaagtaaaagtaaacctgatcactaatttctttcgcagtgtctaggaatgcttttagctcgtcaagtgtatagaagttatgcgatgtatcacgtcctttaaccgctgacttcttaggcaggagagaagatcttgcagggttacgattaatcaattcgatgtctactgcatactctaaaagtttgtgtaagtagttaaaaacggtccgatatcttttatactcattagctaaagaatagaaataatctgatatggttttagtggttagactgtcaacataggactcaccgaattcaggcttgatatgtaagttatataattcgtaagttttctgtgcggttgagggcttaacatctaagacatagcgtttaaaccattcgttccatagctgatctacagtatattgtttttgcttaacaaagtcttgaggattggttgcggctagctgtttatatacagcatcagcctcttcatagctcttaaagccacgacgaaaagtttgtactttttgaccattcttttgacccaagtaaatgtaaaacatgtaacgttttttaccgcttttaagcttataaggcttaattgcggtattttttctttttggcatatttctcacctcctttcaataaactaatgttctcataatgcgtgaaatataagcccgcttgctcggtagagtaggcgagctattttgctaattatttgtaggataggctattttaaacttagatctagatatacctatatttttcccgctattgtttttaattgtagtttcgatagttgatttgtattcgttattagaaatatgggctaatgcaaccattgtagattcatttggagctagagagccctgtgcttttcttaatccttcgtcaactcttggattaataggaaaatctacttgattggttaaattcaaactagagtcggctgtaattgaaacatgcttgtttaagaaatctgatacgcttaactgtttttgggagttattagttaaatagaactcaagaacagttacatatgtaggagaatatttctttttagtccatacttcaaaatcttgtctaaaaggtttaactaacaatgcttctttatttaaatattcgtcaccatcgtaagtatcatttttttgctttttaggcttacggttgggatcatttgcttctcttatagcttttcgttgagatgcagaagtataaggatttttattgtaaggtacgtcattgtgatccatcgcattttgtgtttcaggggacgttagtgttttactggctaattttctagaagcctcaacttctttataggcacgaacaacaactttttgatgatcagataaactaatcgggtcatcatctgtaatagcaaatttaaccgttttatgaggccgtgttttgtcttcaccattatttgataaattatcaatatgtttagtaggagtcataacaatcggtgcaactggggtcaattcatgccacttagagcttttcacctgataaaaaagaaaatgattattagcaaagtcttgcgggcttattgctcttttactagtgttagtgaacgtaccatatacaatgatttgagatcctgcagaactataatctgaatacatcatatgtaaagcttctacgccagttatggtcatttttcctgttttgtctttatatgttattgattttcttcctgtgtatgctttatatgattttgaagccgctgacacggagttattaatatgattaaaattaataatttgactaccactaaataaaacagttgatactgctaatacttttaataatttatgtttcatttttagttattccactccatatttcaataattcttcttgaaccaggtaataattgtcagtgcctatgtacttagccaagttcaaccagttggcacttgcgatgtcattccccagatcaatgtacttttttatttgttcatggactacaaagttttttgcaccgctctcacagcatatgcgagttatgggattgtctttgtagtctttttgcgtatcatcatcagcttcagcatgacccagctcatgcaagattactttttcagtttcttcatctgataggccatctttaacaaaaataaaatcagggcaggggtcaggcatgtgacatatatatccttcgccctctatgtccttatatacgagcttcaaatgatggtctttaagtaaatcttttatacgatcactcataacgatcaccttactctttgccttgaaaatatccttttaagtaagacttgataatttcacggtcatgatcattcatgggcttaccatcgtaggagtgggcgctgtctaatagcttatccaggtcagcgttagaagcgtttgcattagaatgtgaagaaacgccagctaggtagtcaaaactaacgtctaatttagttgctaatttcttgagtgtatcaatcgatggctcatttcttccaagttcccatcctgagacagttgtagatttaacatttattagttcagctaaatctttttgagtgtaatgtttattaagtcttgcgttttttatgcgttcagctaagttcataaaagcctcctaacacaatttaactaggtttctatacatttagtatagttcttttacacaaaaaactagaaaactagttaaaaagtgttgtaattgcacaaaacgtgtactatacttaacgtgtacttgagataaggcaggtgatttaagtgaagtttaccgtcaaacaagctcgcgaatatgccggactaactcaacaagagaccgctaagcaattaggtatagctcttgcaacttatcaaggatatgagtggggcgacgtagaaatgcgaattggaatggctaaaaagtttgctaaacttgtttctattccgttagctcaactaattttttattcaaaaactagttgaatcgtgtagagaaggagaaaaaatgaataatttagaattatttgattttgaaaaccaaccagtcagaattttaaaaatcgaaaatgaaccatggtttgttggaaaagatttaactaatatcttgggctatacccatggcgcaagagatattaatgctcatgtagcagatgaagacaagctaaagtcccaaattaggactgcaggtcagatgagagaacaaattttagtcaatgaatcgggcttatacagtttaattttgtctagcaaaatgccaaacgcaaagaagttcaagcgctgggtaacccacgaagttcttccagctattcgtaagcatggggcttatatgactgatgaaaagattgaagaggttttaactgaccctgacacaattatcaagcttgctactcaattaaaagatgagcgtcaacaaagattaattgaacagcaactaagaaaagatgccgaaaatcaagttcacgaaatgaagcctaaagttctgtttgctgattcggtggcaaccagtaaatcaaccattttaattggtgaacttgccaagatcatccgcggtaacggcgtaaatattggcgcaaccagattatttaagtggatgcgtgaaaaaggctacttgatcaatcgtaaaggcagtgattggaacatgccaacacaaaaggctatgaacttaggattgttcaagattaaagaaacaacaattaatcattcgaacggtactacttcaattagtaaaacacctaaagtgaccggtaaaggccagcagtacttcgttaataagtttttgaaagagcaaagcttagttaaagagtaggtgatcaaaatgagcgacctgcaagaagcgatttaccacatagttgttaaggaagtagcaagaactgaaccaaagcgtaaagagaacttcttaaacaagaaagatgctgaaaagttgattaagaagtatacaaaacagtacaccttgcaagagttcttgaatgctaatgaggcggctaatgtgctgggaatgagtcttacaaccttttggcggtacaggcaaaaataccccgtgcccgtctatgtgattgacggcgttaagcgatacaaaaagtcggaattgattaagtgtgtagaagataacagcgtacgagggtacgcataggaggatattatgccagatttgggcaatagcaagcttgatcatgtattgagttatatctgcaaaggatttgaaaaagtgctggagttctgcgcagtggcgtttgtaccagcgttaattattgagcaactgtgtatttatggcacaacccatgcagatcaagtaatttcattattattcgttctaatgctgatcatttcagcatacggtgtgaagttatttagagattggagaaaagaggactaatgaagctatggaatcaatttatcaattgcgtgtgggcagtagacgaaccgataagtatgaggacgtcaagcaaaatcttattagctgtagcaatgctatctattttgctgctagccctttttaccggctttcagccaacgcaaaaagtattttaggtataaaaaaagccagttgctgacacaactgactaattcaaaacaaaactaaggagattatatcatgaataaccaagtaaaaaacaaattaattgaatttaatccagattttccagtaaattatgcacctgctcaaatcgattttaaaggatttgaggactttcaagctcaagtgcatcaaatccatgcacaagcagaagagtatggtgtaacgccggataatttaaaagaagctaaagcaattcgcgcaaagctaaacagtgctaagaaaaaaattaatcaaagaaaaattgaaattgttaaacatgttgagcaaccagttaaggacttcaaagataaaatcaaacttttacttaatgaagtagacgaatctagtgaactggttgattcacaaattaaagagtatgaagaattagcacgtaaaaagcgccgtgaagataatttaaagcacattaaagctatgtgcgaattagctaatattgatcctgataagatcgaataccaaccaagttgggacaacaagacttactcaaagaataaatttgaaaatgaagttgatcagcaaatagcccttatcaaagagcgacaaagccaaattgctgaagctatcacaacagttactcaaagagccgacaagctggggctacccagtgaacactgggtacatgaattaaaaacacgttcattacctgatgtactaaatgaaatggatcaatacaaagaagacttaaccagtatttcgaagcaacaacaaaaaactaaagtccaagaagctgaaagtttaaagcaagtaggggaccgctatattgaccctgacacgggtgaagttaaggacaaggtaattacactcaagcttgaagtaaaaggcactagctggcaaatgaatcagcttcatagctttttaaaagataatggcattcaataccgtggattggagggctagagatgcaagcaattgaagcaccaagaaattggattggacaaatttgttttagtggcttgccgctgcttagcgaaaatgagctaaaaactgcacaaaaatccttgtttagtgtttttatacaaacgcaacaagaattagaccagcctgataaaaaccagcaaggatatgggtataaatatgctgatcttaacgacgtgctaacggcaatccaggaagcaattggcactaaagatattgcctatattcaacagccagtaatagaaggcggcaagacaggaatacacaattatttgatcaattccaaaggtgcgattatagatttcggtgcttatatgatcgatttagggagtcctaagcctcaagaacacggaaaagcactcacatatactagaagatactcaattagctgtatttttggaattgcctcggaaaacgatgacgatgctgaaagctttgagtcaaagccagagttcatggcaccgaaagaagttgagggcctgactattgcttatggcaaaaagcgcaagccgctagttgaagtatctgctatggcaatggctggtgatgagcaggcacagcaaatacttgcttcaaaggaaaataaaccagcaaccaagatagcaattaaaagtatcaccaaaatgtataaatttgctgaaaatttgttagctaaaaaagatatggcagaaaagaaaataaacgaatccaattctgtggataaaaaagttatccacaaagaagatccatttgagaaagctatgaaagctgcaggtgaaaaatagtggcacaaaggagaatgttttctaaaagaatcgttgaaagtgcccgtttcttgaaaatgccaccttcaacccaggctttatactttcaccttggcttgcatgctgacgatgatggcgtagttgagggctacaacgtcatgcttcaaacaggatcaactgaggatgatttaaagattctgacagctaaaggctttgtaaccgtcctaaatgacgaccttgttacgtacattaatgactggcgagagaataatagaatcagagccgaccgtaaaatcgacagtatttataaagacctgttgataaaaatgatacctgacgtgaaaattcagcatgctaaagcaagagctgataccggtaaaaagaccggtgcaaaggcacttgaagacaatggacgtccactggacaacccacggacaaccaatggaccgcataggttaggtcaggttaggtcaggtcaggctagtctaggtaaggataggtcatcctcctctatagtctcctccaggggaatttctgcggaaaaggatgaggaggatgacagaaaaaataaattattagccgaaatcaagagagttgcttctgaaccaacggaatcggagtggtcatcagttatctctttagctaaagatttaagttggcaagcactaaggcttgtagttatggactttgttgtaaaaatgcaagatgggaaaattgagcgaccatacccttatttgctaacaatcatgagagaaaggattaaggaggaacaacatgcttgataaagacttagttaatgacctcaagcgttttgccgttgatccaaccattatcgataaactagataaccatgttccattaaatgatttagatagtttaaagctgattcagcagctatataacgtgggctatcaggcccataagagcagagtggagttttctaatccgtttggaatttcaggacgctcctgccctggaaaagggcgcacagacatcgttttaagagtagcggaggagaacaagttatgacacgaaaagagccagttatttgcgataactgtcgtaaagaaattaaagacatgtattactacgtcggtgataatggcgttgcgatgcacaccgaaaataatgtcttctgcagtgaagaatgtcttctggagtatttcatggtagatgtcgactttttaagtctggaggaagaaaagcatggaaagcaagaaaattaataaagcactaactatgtttgtgcgggtaaaagttgaaaatgagcaggatatcttgattggcttgaacggagagcaaccacaagaagtactggacggatttacaaaaggactctcttacgcacttacaagtgattcagaagctggattactgaaagtccatcattgcgagcgcacgcaactgtccctatttaagccacaccggcaccttttcacgggtactatctacctaaatccacataaagtggtgatggcgtttatagatgctgacgatgtgccagttgctagcactgatgaaaaagtagatttttacgttgcattagctagagcttgtgcaagtgaggaggacaagaaaaatgacaattagcgatgattggacagcacagtacacaccatatagctgcattaagccaaaaatgatttttacaaatcaagatgatggcaattactatcaactgatttatataaactacaggtattacatccaaaatcttgcaactttggaaatcaaagaaactagccatagcagtggtgttgagtttgttgaccatgttttaaaagaggcttttggcgaaaagagccatttgattgctattcctaacaatcgtcttgtactgaaaattcatggagacgagaaatgaagcttgaaaattatgcaatctgggtttgtaccagatgtcatggaaaattctttgtcatgagaccacccaggtattgcccatattgtagagctactacccgattaggctgtggtggcaacgtaacaattgactttagttttgggaggaaaatacaaatgaaaatcgatttaccagtaggaaccagagcaaccttagaagaatttatcgatgcttatacaccgtattttttaatgaagtatggctatagggagtacagcactccagtgccattaagttgaagaagagtgatttgtcgctctgtgaagactaagtatggtgagattattgtccatgatgacgacgtcttaacctacgcaggcggcaaaaaatgggctgtagagcaaagaaaggagcatagagatggaattacacaaaggtgataaatacaaggacgttgacggcactgaatttcaggtgttcggtgctttggatgacacgtatacatatttttttcattgctaacttaaagcaaaatatcgtaattagaatgcaaccgaaaaacgctgttgcatttctatcagggatgaagaaggtgaattgatgagcgattatgggattatttttattgctgtagcgattttatggactatatccagttgcggagagagcagaaactcaacggtaaatactgtaatccttggtatatcagctatggcgttgatttttctaagaatatttaaagtgatttagaggggaattgtggcgaatgggagaaagcaaagacgttaacaaatttttaaagaaagatttctgggggtacatgtatcaaggcggcattcatccagggcaattaacagggactagttttgatttagcaccagcagggcatagtaataccaactcgaccgaaaaagcttatgtggacactatgagtaaagcagagcgagcacagtacttagccttgactgtcttagtagcgattaaagactgcactgactttgagtatcatggcaaacatagaaccatcttggaaaattactatatccaaaatcttaataattaccaaactcaggtaaaagttggcatgaatgacagtgaatataaaactgcaaagaaaaatgcattgaaagagttcatcagtcgttatgattactggcgtgacgctcgtgattgtcctgaattgccgccccttttctaccctcaaaaacccaaaaatcgcccaaaatctatccaaaagtaaaccatttttcacccaaaaatcgcctaaaaagcgaccgcaattcaaccatgaagggaagtatattggtattgtcgaaaaattaggaagcacgagatctgattttttgacacggcgtgaataccaagtaagttaagttcattaatttaacctcctttaaaattatggtaagaatcgtgaaagcctgaacaggcaaaaagacacgtccgacttaaagttgcggtggtgttggtgtaagtccaaccacgattcataggctctcaagttgggagccaattaacaattcttatattcctttattattgttgttttgtctgatagtgaagcggcgtggaaaaccgtagatctacgctttatacagaggtatagcagttcgactctgctgtgtctcttagcttgcgaagacccaaggaaaacggcgagcaagcgcaaacactgtccgtcacctgtaccatcaacgtcaggtgacaccatgagtcagacaggtgtgtatgcaagttgtggtcttattgcatgccgaggttcaattcctcgttgattctttgatcctttcaggatcacgtgttaagtcagcatttatatgctgatctgatcagtcttgtaccggtcatttgtttttcgaaaatgttgcatgtagattacagtacgcgtggtgctagttaaatcgttttagttaataaaaaagtccaatcttgttagactcgacttgtaaatagtaataatagaaaagagtctgatctgattgaactgccttaagcttaagcgttttagccaccatttacaagttagttttaaagatttagtgataatttgtcggcactggtatcgtttgtatgcaccggctgagtttactcatcggcgaaatattgatcaaattaaaactacggacagtctgattttggctttacttatctggcaagctaagacaggaattgaatcacaaagaagattctgtgaatgtttcaattgtttatcacactcacgttttaatcggcgttcacgtcagctattgcaattgatttatcagatacggcaagaaatgaataaaaaggttgacctgaatggacatttcttgatcattgacagctttccggtacctgtttgccaaccaattcgcaactatcgtgctaaaatttttcgcggttatgccaacattggttataaggccaccaagaaaatttacttctatggtttcaaagttcatgccattgttagcgatgacggttacattcttgattatgtcgtaacaaaagcatcagttcatgatgccaaggagacagttgaactgctggaaaatgcccatccatctaattactatcttcttggcgacgaaggctatttaggcaaagaactgcatcaacagctaaaacaaatgggttatgaactttggacaccatatcgtaaaaatatgacaggagctaaaaagcacaatgatcatcaattgatggctattcgcagaacaattgaaagcgacttttcgcttctgacctattacaatgccgagaacaatcgagcacgtagtctgataggctttcaaagccggttggaaattgcaattttagcttataatttggcttattgtctagaaagatttaactagcaccacgcgtattacagtatatctggtgtgcagtggtatacacgtgagttcaaatctcacactgatcattaggaggaaaaattaatgaaagctttatccgtacgtggtgactatattatgcagatgatagaaggtaccaagaagattgaatacaggacatggcagacaaaatatcgtggaccattgctaatgtgttcaaccgctaaaaaagtggctggcgcagtacctggatatgcaatttgcatagtcaatctaaaagacattgaatggagtgatttcgatgaatgttttcattggagcattgaattacaagatttaattgagcctgtgcccgttaaaggacagctcaagctatttaatgttgatgatagtatgattacacctgttaaagacaaaaaggcttggaaagcaaaaatagagcctttaatttacaagccacgaaaacgaaaaaataagcgctaaaaggcgcttttttattttggtgaaaattatgtataaaacaaaaagattcggattggttagctctaagacagaaaatcaaattttagcagagctggagcgagatctaaaaagagaaaggaacaacaaacatgagtctactagacgtaatcaagacacaaagcctgatcacagatagtgtgcttgtttccttttctatgggtaaagattcgattgttacgttagatctatgtatgaagtactttaagcacgttcaaccgttctttatgtacttagtacctggattgcagtttcaagatgaagcactagaaaagtatgaaaagcgctacggtgttgaaattattgaagtacctcactttgaaaatgctgacttttatagatacggctcttttagagatgctgactatagtgtcccaagagtgaaaattagagcaatctatgaagctttgaggcaggacacgggcatttactggattgccggcggcgaaaagattaatgattcaattgtgcggcgcgcaatgctaaagagcacaggttcaattgatgaaaagcgtggtcgtttctaccctgtcatgtactggactgataaagagattaagcagtatatgaggatgaaccacctgttctatccaaaattcaaccaggaactaggattcagctttcatagtttagctggtaaagagctatcagcaattaaaaagatttatccggacgactatcagagaatattgaaatttttccctgaagctgaagccggtgttttacagtatgagacttataagagaggtgaaaagtgatggttaagaaattgttcccagatttacattcttgggcggctgatggtgctgctagcttgcatcgttatcctgaaggtacaaaagctccgagatctttagctggagacagagccgagcgcagatggtcaagacaagttgaacaacagatgaaatacttggatgatccaaaatatatcaaagcgcaagagcgctaccaaaagcaaaataaagcggatgacaatgcgatggctaagatgcggacagcagtagcaaaggaatatcacaaaaagcatcctgaattgtccaggattagagctagattgcggtcgattcaaacaggtacaggggctaaaattatgagtctatacaatcagggatggagcggcactgaaattgctaaaaagcttcgatttaatgcaaaaaaaggcacttttggacgttcgggggggtagaaatctcttgtgacaaaaggcaatttcaaaagatgatcaacaggaagcagaggaggttaatgatggttcgcaaaagagtaatgtctgaacaagaataccttaatcgcaaaggcgttggaagttaattaagtggagttatggatgaccgcttgcgttctgtcagacaacttagatccacacgaggagaagaaaaattcaatcgtgacaacaaaagtgctatagatagttaccatgccaaacgaaaccaagctagacgcgaatatcaaagactagtatctagcgggaaagttcgaccacctagtaatgctgaaaaagcatggaagactgcacatggattatctgaaaacagagctgtacaagcagcaagacgtgtactggctaaacatggcgtagattggaaaactggcaaaagaatagggacagtttctggtagaggactatggcctacttttcgtaaaggttcaacaggcagcagagggggctagttatgtctaaaccattacaacattttaaatttggaacagtaaaaagatcacaaatcaagttcgctgactataatcctcgtatcattgatgaaagcaaccagaagaagctcattaaagcaatcagagagaatggattaatcgagccgctagtatggaataagcgtacaggtgtgttagtgggcggacatcaacgtttaaccgcagctgataagatttaccgtaaaaaagattatgaagtacctgtagcaattattgacgttgatgagaagactgaaaagaagctaaatgtacaactcaataacccatcgatacaaggcgattgggacttagatgagttagctgatctatctaaggatgtttcgtttgatgatatgggctttgacaaatctgatattgatttcatgtttgatggtgaggttgattttgatggaaaaattaaagatgaaccaccagagagcaagaaagaaacgccttatgatgatgaagtcgaagacgaaaaagacaaattagctagtcttgctgaattcaataagaagaaagccgactttagacataaagacaaggacacaaccattatcaatttttataccaaggttgttttcccatctaatgaagctaaagaagagttctataaaaaggctaatattccagccaacgaagaatttatcacgttcgatcagttaaaacggtattttgaaaagaaataggtgagttaaatggctaaagcaaaatgggaacagtggctaaagcctgaaaatctcactttacttcaaggctgggctagagacgggcttacaaacgatcaaatagccaagaaaatgggcatagtgcgttctacgcttcaatcatggataaagacacatgaggacatttcaaacgccctaaaaaagggtaaagaggtcgttgatgctgaaattgaaaacagtttgatttcaacgatgaagaaacacactgttaccacgacaacttataagatggtcaaaaaggatgaatttaatctaaaagcagagcggattaaatttagtaatgtgtacaaactggaccaccctgaagcttcaaaacaagaaatcttgattgctacagctgcgaacgtagatgtctatgaaaagataccgattagcaaaacggtgactgaagtagacccgaatgtatcagctgctattttttggcttaaaaaccgtagacccgacaaatttagagaccaaacgttccagaagcttaatgaagccaacgcacgcaaggctattgctgatgctggtattagtgaagcgcaacttaagtcacttaaggaagaagacaatccaagcaatcgcacggttattgttgatgatgtagcaaagatgaaggagttgagagatcacgaaggcagtacagataagcaaggagattaatccacacttttatgatatgtggactactgataaaccttatgttgtttgcaaaggcggacgtggctcttttaagtccagcgttatcagcctgaagcttgtaacgatgatgatgttttacatcgcaatgggcaaaaccgtcaatgttatttgcattcgtgaaaatcagcagtacttacgtgactctgtatataatcaaatcctttgggctatgagcattttaggcgttgaatctgaattcagaacgcgtgttagccctatggtgattcaacatatacgcacaggatcaacgttttacttctacggtgccaatgaccctatgaaattgaaatccaatatcgtaggcaatgtggtggctgtatggtttgaagaatttagcaatttaaagaatgtgaatgtttttgatcagtctgtgcccacctttattcgacaaaagcctgatttcgttaaagatgtaaaaatattcattagttacaatccgccaagaaacccatatgcatgggtgaatgagtgggtaacacagcgagagactgatccagattactttgttgacagttccacgtatttagatgatgaacttggctttactactaagcagcagttagatctaattgaaaaatacaagcaaaatgaccccgattactaccgctggctctaccttggtgaggctgtcggattaggtacacaagtctataacatgaagctattcaaggttgtggaccgtattccagatgatgaatacattactgacatcttttacggaatggataccggttttatggtgtctgctacagcttgtgtagcgtgtgctttcacgaataagtacaacgtctatgttttagacacgttttactacgatccaacaaagtacgagcgtaaattatcagcatccgagcaagcggaacgagtacacgactttatcaatcagattactgataaatatggcgttttgccttgtaatcagacaatagatagtgctgatggcggtatttatacgcaatactggcagatgtacaacgtccaatggtctaaggtgcgtaaacttggtgaagccgagatgattgaccgtgttcaagatttagccgcacaagggcgcttgcatgttttgaaaacaccaagcaatgacatctttttagatgaacacaagaaataccagtgggatccagcaaccgttaatagcgatcatccgcgtgttatcaaagagtttgaccacagttgcgatgcacttaaatatggcgtgctagataatgagcagctacttggcttgtctgcataggtggtgagtacatgaacatatgggcaaggattaagagattttttcgtaaaggaggtgcaaagctaggcatggtagagtataaatcgctgagagctatcacagatgatccacgaattaaggctccagccgaagagtatgagcgcattcgcaaggcaaagaactattatcaagataacttgtcgcaagttaagtactatgcaatgggtaacgaacataaacgcaaacttaactcaatcaatgtcacaaaaatggcatcaaggcggcttgcatctctcatatttaacgagcaatgttctatcaaagttgatgatagtcaattgcaagacatattagacaccattctcaagcgtgaaaatttctataccacgtttgaaactgagctagaaaagtggattgcattaggctctggcggtatccgtccttatgttgaagatgacaaagtaaaacttagttatgctgacgctgacgatgtttacccgcttaattcaaacacaaccaaggtggatgaaattgcattgtccaggcgtattcgcaagattgaaaacaacgaagctgtttactataccttgttagagttccatcagtggggcagtagcaaagaagtagacgatcaaggaaatgtttaccgaccttacacgattactaatgagttgtatagatcaggtgactcaaacagcatcggtgagcttgtaccacttaattcaattgatgaatatgctgacttgcaaccacagtcaacatttcagcatttagaaaagccgctttttgccttttaccgtaatgcaggagcaaacaacaagagcctagctagtccattaggtttaggcttgtgtgataactattggcacacggtagacgacattaacgctacacacgatggctttgcatgggacgtgaagactgggtacaggcggatcaccattccgaaaacgtgggtaagacgtcaaacacagatcaacggcaaatcgattcctgaaggctcacagatgtattgggatcctaaagatgcggtattcgtaccaattaacgcctgtaatgatgactctagttcattcaaggatttagcaattcaaattagaacggaacaatacacggcttcaatggacttctttttacatgaatttgaaaatgaagttggattaagtcaaggcacgtttaccacctcaccaactggcgttcaaaccgctacagaagtagtaaccaataactcaatgacttaccaaacgcggtcatcttatttaacgcaagttgaaaagatgattgaccagctggtatatgcgattgctgaactacttcaaacgcctgatgtatggagtgatagacaagctcggtggtctggtgacattgataagctgacaattacgcctgattttaacgatggtgtatttgttgaccaagaagcccagcgccaaagtgatttacaggctgttcaggctggtattttgcctaaaaagcaattcttaatgagaaactacaatcttgatgagaatacggctgaccagtggttaagtgaaattcaagatgagcaatcaccagagccgccagagcaagaaatgtcaatgtttcctagtgagggtggtgtagcaagtgacagatcaagagataacgcaagcccagatgatggagaaagcaagtaatattgctgattattatgcttacacagaacaacagatgttctatatcttgattgactcatttaaaaagacacgtccagagttgatgaatgctgaaaaagacccacaaaaaataatggaatggcgattaaaggccctatctgaattgggcggattaactgataaggtgattaatttaatcagtcgttctagcggctattctaagcgtgctatttatgacttgattgaaaaagatgggctaaaggttactaagcagttcaatcgtaaacttgctaaaacgctaaaaaagcccgtacacgatgtttctttacagtctagggcaattatcaatagttacgtcaatcaaacgatgagaggcgttgacaattacgtcaatcaaaccttattaactcgtaactatagcaagaatgcggctgctaagacataccaagaaatagtaaataagactgttaacgatgtgattgtaggcaaaaagaccccacaaagggcactaatggacaatatttaccagtggcgcgataaaggtatgagttcagcgttaatttacaaagcaggtcatgaatggagccttgagggctacacacgtacagtgattcagtcaaccacttcacgtgtttacaatgatttgcgtgttaattcaatgcaagagttcgattccgtgctttgtgttatgagttcacaccccgcagctcgtccagcatgcgcaccaattcaaggtaaagtggtgtgcattgtaccgactagtgaccctagatataaaaaaggctatccgagcatttatgactatgggtatggtacaccagcaggaacgcagggcgttaattgtggtcatgctctttgggcttatgttgaaggcgtatcgcacaattatcaaaaacaatatgatcctaaagaagctgtagcaaagatgaaagtacagcagaaacaacgctattacgagcgtggagtacgtaaaaataagcgcaaattagaactagccaagcgtgctggggatgctgacggaataagtaagtattcggctggtgttcgaggttatcaggctaaattaagaaaaattgttaaggatcacgatttcttagcaagacaatattcaagggagcaaatagcaaaggagaaataatatggatcagttaacacgcgaaatcaatgacttacagaacgaaaaggacggtctaataggtaaaattgttaacttagactcttacttaatggaacacacgctatttattggtcatgaaaaagagtatttaagaacacaaagatcaatcatgatgagttatgttcaaatgcttgatttacgaattaatgaactaaagcaatatcaaaagaagcacaattaatttaaataatcgacccgagtaagtcttaaaactgcttattttttatgctcttatcgtggtcgtaccacgtataaattaaacgttaggagaaaaatatggaacgtgaatttttagaaaaacaaggcttgaatgctgatcaagtaaaggctgtcatggctcaatatggtaaagacgttagtgaattaaaaagtaaggcttctaaagctgataactttgaaactcaaattggcgatcttaaagaccaactgaaagaccgtgacaagcaattgactgacctgggcaagcaagccggcgacaatgacgctttaaaagcccaaattgctgaattgaaggacgctaacaagcaaactcagaaggattatgaagctaaattagcaaaacagaaccgtgattttgctgtttctactgcactcggtaaagctggtgcaattgaaaataaggcggtcttaccatttattgacatggacaaggtctctgttgacaacaacggcaacctgctaggctttgaagaccaattggaagccgctaaaaaggatcattcattcctgttcaagcaggaagaaaagaaaacagaatcaaagcccacgccgcatattgtgtctagtggcaacaatgattcagatgttgaaaagaagccatctgaaatgagtcttgacgaacaaaccgcgttgtatcgtaaagaccctgacagatgggcacaattatttaatagataggagttttaaatggctgaaacacatttaaaagatatgattattcccactgtctttggcaactgggtgcaaaatctttcagaaaagaccaataattttatcaagtcgggtattatgaccgccgattcagatttaggtggacgtttaaatcaacctggtaccaagatcactattccatatatcaacgacttagacggtacgccaaacaattggaccgacgatactgacattcctgtagacaaccttacttcaggctcacaagttggtatgaaattctaccaaaacaaggctttcggtgaaactgatctttcacggcttatgaccggtgcgccaattcaacaacaaatcgcttcaagatttgctaatttctggaatactagtgatcaagttatgctgtttgcagtccttaaaggcatgttccaagtcgatgacattgctaattcaaaggtgctcgacttaacagtgcaatcaccaactgacgctaatttcagtgctaagggatttattgcagcactttcactcataggcgatcaaccagaaaatattttgagtgctattgcagttaactcaactacctatgcgatgatgaagtcacaaaatttgattgatcctattcagccttcaaacggtgctactccaatcaacgtctataatggcaagcaagtagttattgatgacgatattcctgtaaacgatgatggcacttctgtagcatatctgttcggtaacggtgccattagatactcaacttcaatgtatggcactcaagtagtagatgagccacttaagcaaggtggacgtgaatccgttgtacaaaagcgcgtcggctgtattcaccctgctggtatgtcaattgaaccatcatttgtaccaacaaaggcaaactttccaacacctgaagactttgctaagaaagaagcttggacaatgcctaaggatgttgacgttaagaaggtccatttggttgagtacaagttcaagcttgacccattctttgtcttaaagcaaaagtctcaaaaggctgttgacaaggcaaagcaaaatgctgaacaagatactgacaaggatcaaggcaagtaattaggaggctagattatgacgccactgttagattatgagacatatgaaaagctaggcggcacggcaccagaggacaaatttgctaagttggagctagatgcggaagacctgattaatccaagaacgaatttttattacttgtctcattcaattgacactgacgcagacaaggaaagggtttacctatttagaaaggccttgaccctgcaaattaattactcaaatgatgttggtgcgtctacgccttatgaaatgtctgataaggatattaaaagcgtatctgtggacggtacaaccgtcacgaaaggaaccactccaattaatttcgtaactgatggtgtctataatctggctactgattatttatttagagctggcttgctctatcgaggtgtgccttatgattagaccacctaaagcgatgttccaagatactatcaccctgaagcatttagaagccgataagagcgacccctacggtgaaagtgaaacagttactcaaactgagattaaaaacgtgagattcagccttagaacagtgtattcgggtactaacaatgataggcaagttgtagcaaacgccacaattgtggtcatgtctacgtactcggagccgttctatgaattcacggagcaaaatcagggcgacaaaattgtttttaatggtcatgaatacacgattaagacaattaaccgtgacatcgagccttttactaatcaggtctatcaatatagattgtgggtgatctgatgggtgttaaagttcatgtaaacctatcaggcttaaaccgtaaattaagcgctgagagcctaaaaagagcacgtaagttaatggctaatgatgcacttcaagcaatgaataaatatgtgcctagttcatcacagggcaacgatgaaagcggctcaactcttagaggaatgtcaagcgttgctgaagatggctcaagtgttatgtaccgcgcaatttatgcaagggcgcaattttacggttttattaccaataagtacggtggtccctttagaattcacaattacactacgcctggcacgtctagacggtgggatttacggctaaaaggccataaagaagacatgaatcatgtcaaagaagcttttgtgaaaggattggacctgaagtaatgctagtaaatgatttacaagaagcgttggttaataacatcaatcgccgaattgactcgggcttttttacctacaataaggatcatgtgctgatcaagtatcttgataaagatgatgtagttggtctagtgcctaatccaggtagccacatggtcagtatggacatggctggtgaagagtactggcaatacaattactcaattactatgcggactaaatcaagagctgaagcacataatcggttatttgagttaagtcagtatctgcaattgctgaatcaaacaaaagatttaattagtaaaaatggctcgtgggtatttgatcagattgaggtacctaacgaaccagcagaaattcaagaagatttacaaggaacagttacatattcgatggacgtggctgtttttatttacaaacaaagaggagttttttaaatggcagaagcacaaactaaattcatgcctggtactaaggcagacaatacaggttttccagaaaactttgtcaatcgtatttttatcgatactaagccaaacgtagataatgcaggcgatgttgacttagacgatgtaactaatggctcatgggcttgggtagcctcaggtatcactagtcaaacaccaagtgccaacgaaacaaccactaatgacgcatattacgatggtggcggctttactgataccgacgttaccggtaaacaaattcaaattgctatttcaggtaatcgcaaagttggtgatccagcacaagactttgtagaaaagttgttctttaagtttggcacatctgttaagacccgtgttatttggattaagaacaatttaccaattattgcgcgttgtactatttcaaacattgttcctactggtggtaacgccaatgcaaaacaaactttcagtttcaacattgcctttaacggtcggccaaagatctttaatggtcaattaaccatgactgcaaccagtgtagcaaagatctatagcgcttctgttgattcttcaaagaaggcggctaatgatgatgaccttgttccagctgtaattaaagaagaagcagacgcaacagcgtcatctggttctgacacaggatcagcaggaactggtaaggacaagtaaacaaagttaggagaattaatagatgagtgtaattgaattagatggtttaaagaattttaacaacgtacgtgaaattaagctcccaggtattgaaaagacttggaagatcaagttcgatgacaattatcgtgtacaatccagtttaattgctagtcaagtggacaagctttatcaagaacaatcatctgatgattatgaggaagaattgcttgacatggcaccagcagaacgtcgcaagcgccttaccagtgatttagctaagtttaaaaaggcttgcgtagatggcttgagtgccttacttcaagacgataatgcaggtgaagaaatctataaggctatgggcgaatcaactgaaatttgtgcccaaattattggcaagatcaacgacactgctgataaggtgctcaacgtcgctaaggacgaagagaagaccgcaaagtacgacacggaaagatagtgaacttatgctaagtcttactcatagcccaacaacacagttttcgtggaatggggaaatttatgatattgacctagcgtttgacactgtcttactgtatctgcaattgcaggaagaccaagaattaaacccattccaaaaatggcggcaatcttgtaaattgttttttggcaaaaatcaaagattgccaagtgatccggatttttacgcgaaatcatttgagaaaatctcaagaattatcactgatcagccatatggactaaaggaaccagaaaaagatgatggaggtatagaagcaaccaaacagtttgactatgtcagggatgcgggcgctatctatgcctctttttttgaacaatacggaattgacctcaacaaagaacgaggaaaaatgcattggaccgtcttcaaagccttatttgatgggctaggtcctaaaacatactttcaacgtattttggagattaggcgtgaagacgccagcaagattgaggatcctacagataggcaagaactgcttgatgctcaaaactactatgcggttgatggctctaagactgaaaaggaattagagcaacaagctttgaacagtagtagcttgtccaacatgttcgattcgttactagatcaagcaaagaaaggaggtaactgatggctgacggtacaattaagattgacattgatattcctgttgaaaaggttcgatctgatactaaagaagtcgaccatatggttgaaaatatcggtaagaatgctggtaaagacatggacggctcttttaagaagaatgccgaaaacgttaagcgtgaagctaagtctgcaggggatgcgatagataaagatttaggcaaggaacataaagctaagatcaaggttgacgactctgaagctaaatctaaggttagtgaggctaagcatgatttagacgagctacctaaagaacgcaaaactaagattgacgctgataattctgatgctgaccgtaaaataaatgagacaaagcgcaagactaacgaattgccaaaaaagcataatactgacattgacgccaccgatcacacaggtggcgtttttgctaggattaagtctcactttgacaaggtcaatgaagaaggcaagaaaacacatagtctttttggaactatcttttcagcgaatattgtttctaatgcggctatgggagcttttggacgcgttaaagacgcattaggtggaatgataggcgaagctaagcaatacgccctagaacagcaaacaatgaatgccacgtggctgactttgactaatagtgcttccaaaggcaaagctatggtaaatcaaattaatactatggctgcagctgctcaaaatagtacccacatggtcgaccagttatctcaaaaattctatgcaattaacaatagtgcagagcaaacgggtaagttgactaaggcagttctgacattacaggatgcttttggccaaagtgatgcggcagtcgaaaactttggtactcagtttgctcaaatgatggctaacggtaaagtatcagcacaagacatgatgtctatcgttaatacttttccaaagctaaagcctatgttgctggattatgaacggcaaattcaccacagcaaaaacatgacgatgtccgaaatgtccgacttgatgtcaaaaggaaaaatcaagtcgcaagatatgatcaatgttgtgctaagagctggcaagaaatttcaagccgcaactggaaactttaccaaaaccattcctggtatgaagcgtacagttgaggctgaaatgcctagacttttacaagccttcgaaggtccattaactaaaatgcagagtcctatctatggtgctgtatctaagtgggtaagtagcaaaaaaacagagaaagaatttggtgcgcttggtaagactgtatctcacggaatgaatcaagtgatgaaggctttttctggtggcaaagccgtaaatgcaactaaggccctggacaatgctattaacggtattaataagggacttaaaggcgtgtttggctggattagcggtcatgctaaagacctcaaaacaattgtttcaagtgttgcaagtattggtggtcagctagctaaagcggtttggaaggactttgcctcaattattaccactatcggcaatatgtttggcatcaccgccaaaaatggaaaagcctctggtggtgctgttcatgtccttgcagaagccttaaattggttagctaaacaaaaatgggctataaaaaccattgctgcttctctggtaaccatagcaaccattaagcaactggatcatgttgctggcagcttattttcaattggcaagaaaggctatcatgcttacaaagatgtaaaagccttaagagctgggctaaaaggggttcaagatatcaagaacttcagcaagaccgaacaaggttttgtaagaattggtagcgcagctcgtagtgctgctaaatgggctcgtggcttattcagtgcttcaaaaggtggcgctggtccacttaacggccttctgcagtccgctcactctgctggtggcttcaagaacttaactacagcgggcaaaattggcactggcttagctggtgctggtgttgctattgatgctggctcacagttcttaaatgcttacaaagatcgccataatgctgacaagcgtagtcaagatatcggtaaaggtattggtgctggtatcggcggtggaatcggattgtatttcggtggcccactaggtgcagcgcttggagccaaaattggtggctttattggtaaatggggtggcgaaggagttaaccaatttactaaagggtggcaatctcaaggtaaaaaagtaaaaccacaaaattgggtccagtggctaggacttcaagctcacaacagttttagtttctttgctggattaggcaaaaaagcaattaatggtattggcaaaggaattaatagctctaagcaatttatccaaaagaacggtaaagaactagctttaacgtttgctgatccgtgggctggaattcctgctttgattctgaaaaataatcctaaggcacgacaagccgtaagtaaattcgctaagggcatacaaaatggctttaagggcttgggtaaatggcttcataacctaccagctaacatgcacaaaggctggaaacagggtgttgaaaagtcacacaaagtgatgtctaagttctggaaagataccagcaaaggctggagaaatttctggaaaggcgttaataacaatcgttatgttaaggcttttaaaaaaggtgaattttttcaaactgctgtaaaggatatgaagtctcgctggaagtcattcagcaaagacttcagcaagaaatggaactcaacttggagaagtgctcaaaaacaaggcactaatttcaagaaaaagtttggtaaaacgtggaattctacttggaaaagcgcaaggtctaagtggaatagcttcaaaaagttatttagcaaagcttggtcaaataattggaaagccataaactccaatcgttatgttagagcttttaagaaaggtaaattcttcagtacagctctaaaggacatgcgttcacgttggaactcatttaagggctggctgggcaaaaattggaacaatttctggaagtctactaacaaatgggccaagtcttcatggaatgggacagtcaaaaactggaactccatgtggaactcaattaataaaggttggaatagcttcaaaggcaccatgaatagtgcttggaaaaacttctggggtggccttgcttcaatagtcaaaggctggggcaagactatcaaggatgactttactgggacaattaacaacgtcatcggtggcgtcaacgacgttattcatgccttaggcggcggtaaaaagactattgatttcttgcacttcgcttcaggtactgactggaaacacaagtatcctattcctgctatcttaaatgatggcactgacagcccgcaaacacacaatcgtgaatcaatcattcatgctaatggtgcgtgggagttattaccagacaagactaatctcaagcgctttttactacctggtgatgaagtggtaaatgctagagacacagctaaactgtttggcaacgctgttcactttgctagtggttcattaccttacggaatcagcctacctagcgttaattactctcaaattgaagaaaaggcactcaaacggcttcaacatatcaatgaggagcatttacagctagctaagaaagaagctcgcagaaagcaagctagagaccataagaaggacagtgagtccaaaaagagtaagaaaaagccatcaaaacataaaagttttactgctgatgtgaaaaaacgcaaaggctctattttagttgacacaggcttactctatgattctaaaaaagatactggtaaaggcacctacataaacgaaaagctgttcaagcgtttcatgtcttacactaaggctaaaccgattaaagtaagcaaaaacagccgtattcgttaccatgatttaccaactaaacgacaaggtaaatattacctagtagattcaaaatggctcacaggggctaaaaacaatactggtaagcttgaaaaactgaatcgtgaaagttatctaaagcttttacaatttactaaagctgaacgtaagtacaagctccctaaaaagaagcgtaaagcttcttccagccgtcgtagaacgacaactagaagaagacagtcatcaggttattcgagtaggtcatactctacaaggagatactcaactagaagttattcaacgggtggttattcacgtgttggtgcttctgtttctgctagtgtaagtggattgaagagtgtccaggctttgtctaaggcattaaaaggactcaagggcactcacaaagtcaaagtaaaagcatcagcaagtggtagcaagtcgattactaagctgactaaaagtattaaaaaggtagctggcaagcataaggtcaaattgcaactcacaggtactaagacagtatctaagctaagcaagaatcttaaaatacttactagtcgtgtcaagtctagtcgatcagctctatcaaagattaggactagcgctaaacatgcttctagcggtcttaaatcattaggaagccgttctagttcaacagctaaacacattaaggcgctgtacaaaactactaagaagtctaaatttggttctgcaatcgctaagcaagctgaaaaggccgttaagtctctcgaaggcaagggcaattttgccaaagcctttaagaaattggctaacgagactaagaaaactcttagcaagatgaagtctgaaactgaaaagaccttcaaagctatgtggaatactttgaagaaggattcttcaaatagcgagggaaagattgacagtgatctaggcaaattcggcagtaagttcaagcatcaatggaccagcattcaaagcggcgtcaagtcagcatttagcagattctggtcttcgatgaaaaggactgctagagacgggttaaatgacgttcttggcgttctcaatcaggctattggcaagattgataccgtagttagtcaattcggcggttcaaagaacgctgttcacaaagtggcaagactagcaacgggtactggtgctttaggtggtgtaagacgtccaattacggcacctacactggctatccttaatgacggcaatgacagccctgaaactggtaataaagaagctatttgggacagaaacacaggtgatgttgaagtcgttcctggtagatttactcctagaatccttaaaccaggtcaagaagtattcaacgcaaccgaaacagctctattaggctatacacagcctcagcattttgctacaggtaccggtgcacttaaagaactgtatcatatcgctaaaaacaattgggaacaccctcaaaaaaccggacaagctctatttagctctataaatggtcttactggtgcaattaatcagttagcccaaggagctaaaaaaaagggcgaaaatcaaggcgttaaatggtggtcacaactgtggaaaatggttgatgacaaggtcaatgatggcgctggaaatgtatccggattgcttaaagaagctattaaggtatccaagggcaagccgtatgtttggggtgctaaaggacctgacgcttttgactgttcaggcttggttgaatatgctgctagaaaacttggcattaatttatccgctccttctggcactgaatatagtcaagttgaacatattcctcgttcagaagcgcgcatgaatgacttggttttctacggtgctggcggtggtgaacacgtaggtattgttagagataaaaatacttattggtcagctcactcaccgacatcacaccctaatattggctatgacagcatcgatgctgcacctgcacatccaattcttttcggccgtattcgtggctatcattctaagaacgataaatctggtgacgttaaggcgaatactaagttgcaaaagcagattaaagaccaagtaggttcaggattctggaaaaccatccagaagattgctgacaagtacggcgataatggtatggcagcagcatttaaattaggcggttcagttggagcaagagctaaagcacttgcaaaagcaattaaacaagccgttccaggtgctactcgtaatggacttgctgggattatcggctcatgggaatttgaatctggcggtttaaatccagccgcagtgaatcctaatggtggagctagtgggctagggcagtggttaggctcacgtttaactaatttaaaggcttacgctagacgacaccataaatcatggaccgatccagctacgcaaattaattttgcagttaacggtgatggctcagacagtgcaacttttaagagaattgctagaggccatggttcaccaggcgaattagccaacgaattttcacaagaatgggaacgtggtggctatgatgcgcaacacgtagccgcagctaagcaaatcgtcggctggttaaaaggctatgcacgtggtggaattgtatctaagcctgaacttgctatggtaggtgaaggcaatgcaccagaatcaataattccgtgggatcctagtcagagatctagggcttaccaaattatgcaaacaacgcttgataacttcaaagctcaagatggcaatgctcagaaataccaaaatcaagctcagcaggttgttgacttaactaagacaaacgctgaaattcaagccattaacgacaaatttgatgaggcactagcggctttaggtattcttacgtcacaagatgaagtgattcaagttaacagctatcttgataagactaagattactgaggctatttatcatgtcatgaagcggatgaatattagatctaatagaaattcgaggtacaacataagtgggcattaatgataatagtgagattatttttcacaaccgaagctcaactgacttcggtattaaagttttatttcctttcaatccattggcaccagcgcctaaaaagcaaatgatgtcaattccagggcgttcaggtgactgggctactaacgacagtacttataattcgtcagaagcgcctgtaaatgtggtcattcatttacctagaagatatgaggactgggagcagctgaaaaatgacatcgaaaattggctatatggtgatgaagactggctgagatttagcagaaattctgattacttatatagagctcagatagttactgctcctacatttacacccgttaattttgaaagaactaacgcgacattcacatttcacttccaaccatataaatatgatgtcgattccattcattggcaggattttcccagaaacggtactgtatacaatcgtgaaaatatcgatgtaaaacctgactggcatattaatggtaaaggcaattttatgctcaaggttaacgatgtaccgtatgagtttaataacattgatggtgacatttatttaaaaggcgacgagggaaatgcatataccaacgatcctactgccgcctatttaattgatggattattaaatgatcacataagactagcaaataacaccgcacctgttctgtacgctgagggcaatggtagcaattcaatttcaattgaacctatggacactaattcaactttaaataaggctgagtttattcctagatggaggcgattaatttaatggttgatacggcaacaactgaagacactggttatgctattggattagatgctgaacaatcgccttatcaagatgtcatgcaatgtccattactactagggaacgccgtagatgacgctagtactcaaggtgaagcagcattgtttgactatatcgaatgtaaagtcacttggaacgccaatcaaattcctacattacagttaacgtatccagaagatggtaaattcattaagttaattcaggttgaaaaggttatagttggtgatattaacagaattttgactcaccaaaaatttagaatcaatgaagtgcttagaagtgatcaaaatattgtagtgaatgcgacacacattatcggtgagtacttggtcaataatcctattaaaggttcagagccaattacaggggctaatgtgacggcttcatggtgcataggcgagattctagggcacctagctaagccagtcccagagcttaactatgatagcaatgtgaccaaggtggcaaatgctaatattgatatttctaatacaaatgctttaaatgcattgcttgatgctgaccagatgggtgataagccaggtaactcagtcctcgcacaatatggcggggacttttattttgacaacacaaccatttatcatcgtgaaaatgcgggcgaagatagaaatattactgttagatacggtgagaacatccaaacatattcccaagaaaagaccatcaacgatatgtatgttggaatctatgcattcgctacatacaatccaggtcctactcttgcaacgctgaacaacgttgactggaatggtgtagccgatctgactgactggaatagtgttgcgacggttacttacaacgctagaggcgctgtagatatttacaatgcacctgttaaaggcgctcaagtaattgggcagctgacaacaggtacacagattcagcttggtaagcccattagcgatggccaaaccgtttctagttcggtcaaagctggcgtacagcttcaggttaatactatgaacggtgatcaatggtatccattggcttcaggcggctggatagatggtagttttgtcaacttcgataagactggcgactatgttgttaataacgtagttggacatatccatactgcaattgattcggctggtgcattggttagatatcctgttcacggtactggcacggtttcatacactgagggttataaaaatattcatgtttattactcacctgaccaaggctcacagcactatagacgtaataagccaggtactaataagccttggctgattcataacggctctaaaattaagtatgattatgtgacaactgatgaaaatggtaagacttggtatagaatcggtaaaaatgcatgggtgtatggtgatcacttatccactgataaaaacggtgatgttcaatcctactcttcacggggctatggcttggttaagagcggcgcaaagaaatacgctcttaaagagaaaacaggcacgatggaggtacaatatcatcacttaagtcttactgctgctagaaagcaacacaagaagaaatatatttacaaaggcaagggcaaaaagaaaaaagctatcaagaacccgaactatcaacgaggcaaggcaatcacccaaaagcacaagtactacaaccttaattatggtcaggtacgtgttggcggcgttctttattacaaattaagtaatggatcttatgtaaaagcttcagatattgacaagaaagcaagcaaaactactgttcctgaatcgcctagcaaaattatcagcgatattagcaaaaaccgcggaaagatcgaaatgtattccactccttcaaaagggagtgcggctaactggtcaattcctgctaacgttgagtttgatatttctaagagtgctcaaggtgcagatggcaagacatggtatcaggttacctataaaggcgttaccggttggattcctgctgagtatactagttcaagcggtaataatgatttagagccacaagctccagattcgagtgctaactcgtacgatgaaagctctgatgaaactatagcatcacctcaagatcaaacggtacgtgttgaattaaccgatgatttagataacgtggttaatggtgtaatttatccaacaggatttaataattcacctgaaaacgcacatattatgaagcttgatctatctaactgtattaaacatgatgaccaagacttatctgggttgcaagacgatggcacttataaagccactgctactgatattcagcaattgtatcaagcggctgttggttcactaaaggaatatcaaattggagttattcctattagtatgactgtcagctatgctgatttagatggtaacaaagccgacttactagctcttaatatgtacgatacggtaaatgttgattttgcccgctttgacaagattgaaaaaggtaaagtcagcggcaccgtttggcaaatgaaagggcaggactcttgctatgagtcggttacaattggcgatccacctaagtcttatgaacacctattgcttgaacaagccgataaaaacgcagctagtcaggtagcaagcgctgctggtcatacacaaggattgctaagcaggtataagaatatgcttgctcaagaaggctctaatcgtattgctgcagagcgtaaacttatggacgatctaggattagtacaacaccaagttgaccaaaatgggcgagatattaagactaatctggtaagtatgaagacttttgaaaatcagatgaacgagattcaaaattttgccaacgatatgactaattgggtcatgggatctggttcaggagttattcaagccaatcctaactggcaggagcctacgtcgctgtcagctacaactgctaatgggggacacatgtattttagtggtaatggactggtattcacggacgctggtggtcaagaaataccgcggtcaggcattgactctgaaggtcgtatatatgctgatgcaattaaagccggaaccattgaggctgttaacattaaatcatgcttggttgaaagtgctctaactattggtactgagggaggatcaatgaacatttacattgggactgaaaatccaagaagtcaactaacaccttacaatggtggtaacgttatttgggcaatgtctgacgggtatcaatcaatgatgtcatcaggtcaatttgcggtaacagatggcggcaatgaaactagaattcacccatcttatatcgaggttaatggttatcacgtaataacagaaggaaacatcaattattacattagaaatgcagtaagcgaatcagctattaaagcggctttgggtattccatcatatgcaaatgctgtttgggatggtggctcgtatccacatttatcagagtacattagacaacacattccttctcggtatcgtacgggactataggagtaaaaatgaacaatcaaggaaaaaatttagaatatacgcttgctggcaatttaggcaacatgattggtcagcaagctttgcaaattgcacatttacagattgcattgaagcggaaagatgaagaagcaacacaaaaagataatctaattgcggaactgaaacatcaaattgaatctttacaaaagagaggtggtgtaaatggcgaacgacaagctggtactaaacatcagcaaaattaacatttcacccgattcgaccaggctcaaatatagtcaagatgaacggggaaaacaggttgatataactgtaattgataatgatggcattactgcttataacttaactggcaaaaaaattgttttttcagaaattaaagatggtgggaaaactatcattgatgatgaatcaacccatttcattagatcagctgacaacgataaaatcgggaagttcacttatatttttccagatcaaacttatcagcaatcaggagaagcgcgatttgaattcacaacggatatagaacacattgactcaaccatcagctttgatatttctattgtaagttctgctcaccttaagcctgataatacgtcctacgtaagctccttggtggcactagaaactcattacaaagcggttatttcaaatgctgaatccaatactcaaaacctaattaatagcctgactgacaaaatcgatcaggctatttctaatgggcaaagagatgtagctaatcagcttactgacatgcgaaaccaacttcaagcgattcaaaaccgagaaaatggtttaattcaaaattggactgctgatttcaacactcgtaaagctgattttgataagttaaagtcagattggcaggcgcaatctaaagctatttcggacagttatcaagctaagatcaatgaaatcaacacacaagctcaatctcagcataacgatatccaggctaaagcagatcagcaactcaaaaataaccagtctgctaatgatgctgaaattgccaagattaagtctgatgcacaagctcaacatgatcagattgaaaaggctaaaactgctgcaattgcagcagttaactctcaaagggatgctgcgattagcaaggtaaatgctgactttaaagctaagatcgatgcctttcaaaaagactatgacgcatggaaatcaaccacactagctgactttactaagcagttagctgatatcaagaccaacataagtaatgaccaatccacgctgaaagattttgacaagcagcttgactacaccaaagaaaagctaacggctatgactaaacagctagatagtttggactttaccaagttcgtgactggtgatcagtttaaggaagctatgagcaaaaaggcgagcggtctaaagattatgggattaggaggcgaatatgtcatggcagtagatcaaagcgatcaaaacatcaatggtttgcctaatagtgtgcaaggattagctgatattggggtgctttcaggggctttacaagtactagctgatgcgattttggacaagaatcactataccaagcctgaagtagataagatggtcaatgatgctaaagctgcaatcatgaataccgtcaacaccaaggctaatgcaagtgatttaaacaataaggctgacaagtctcaaattcagtccttaagttcacaattagaatcttataaacaggaaaacaataatcttaagaatgaaaatacacagctaactaatcgtgttcagacgctggaaagcaagcagttcatcgcacacgtggctcacgaatctgatgtagcaagtcagtcagcgctaattgtcatcgtggatgactagaaaggagtttatatgagcaaactaattttgaaagacaagaatggcaagcaagttgagttcttgaagaaagatgaatttgatggcaaagttaatacgacaaacgctttgcaccaaactaaatttgaaccttataatttgtacgacgctttgtccgaatatggaaatcaaacattaggcgcgattcataatagttttagatcaatagataatcagtcattgattggcaattttgattcgttactagtatttggtggtaacgatgttaaacacgcaattgatattggaacctttgaaaaacgagttcgtatttctactaaaactaatgggagtgtttggcaagaagatctggttttaaagtctgactatgacagactttatgatcgtgtatgtgccttagaaaaaaaagtatggagggataactaggtacctatacgcctgtcttatcaatactttagctgtttccacaaaggaggtagcgtaatgaagatttatggtaaaactgacaacggttatagtagacttgcaactttagatgaagtaagtggcgcttatccactagctgggattaatatgcttccggcttcttcaatgcaaaacacgagtgctgaattcttaaaagcatgtggttgggaaagtgattttgatccccaaaaaattcagatagatgatgatggcttaacgcttgactcaatgaactatgattttgtagacatcagtactattctttcaacagacattactccgtccactttctatacggtttctttatcactaatatgggccaacaacctcaatggagatctattctttgtcgaacttgatagtaatggcttaggatttaattaccctaattatcgagatcatcaaattcatgggatagaaaacttaatacttttacttttgaaacaagcaacaatcctgatctaaagcagcttaaattttttattagagcatataaaggctgcgcttttaagtttaagtatttaaaacttgaatatggtaaaaatgccacaatttggactccagcaggcggagacattgaaaaaacatatggagctttaaagtctcaacttggggggggtaaagcctagctataggctttgcgtcacttctttaaaggaggtggcgtaggatgaaagtatatgttaatggttttcttttacttacagatactaatcaactattagatttacagagttcagtaattgatatcagccaacaggctgacgcaaataatttaagcaacgggaattatagattggataacgacctaccagcaaatgttccatctgattgtcattatggacttttaacatgtattaaagtggcaccaaattggacgttacagttttgcatttcttgggatgcaaaaatttacaaaagagcacaaattaatggccaatggacaaagacagaatagtttaaagcatccctagtagatgctttttttatggagaaaataaaatgaaacagaataattcaagaccgccaccagcggtctttttgatacaaaaaatcactagctacagaaaggaaaacattatgacagaagaaactgcaaatacacctgtacaaggtgcagaaaccgaacaacaaaatgtggccaacaatggccaaagtggtaataccgaacaaaagtctaagactttaaatgacgtcttacctggtgaaggaaccaatttggtttacatttcaggcatgctgcaaggtcagcaagttaactgtgaaggaccaatcgaatatacgcgcaagcttgatcatccacaatggccatttattcctgctttaccacagtacgatccaagcaagtgtaagacaccaacgtttgactggggcaaaggtcaatggaaggacgaaagcgaagaggctagagttaagcagcttaatgatttaaccgaaaaggttgcttcaatcacaactgatgtgggcaagattcaagaaactcaagaagccgctgcacaagaaaaagaggctagcgacaagaaagatgatcaagtctttaagctaatttctgctatgaatgttcaattaggtgttatcaacactaagcttagtcaagtaacttctaaggacaacgaggcatctactaagcctgctgtatctgctcaaaatactcaaaacggtacaaccaccgaaggaggtgctcaataatgtttgaaatttataaaatggaattcgatattggaatcgtaaccgctgttgatcttaaaagctacattggtatgggaattcttagtcaacccgactatgaaagaatcgtgggtgatgaatcccatgaagaaagcaattcaacgtctgaagtccaagcttaatgttcgaaatagtgagattttaattggtctctttatcttgggcaaaggattatggctttatcatgacagccactactttatttatccgccgcagtttcaaaacattgaaaatagccgctatatcgatttagggctaatccttttaggtgctctactgatgataatggcttttttagtaccttacatgaagacaaccaagcgaaaaatacagctgattatcgttagcaaagtgtttttagtgttggctggtgttgtgtgtatggttttagcattactgcagatcacacacggaatcttcacacccttttatcgtatgggacactcagcatggggtgactttatcattttttgctttgtctatctgacagctagcgacgcctaagaaggtgccgcgatgaaagatattgggaacgtgatagggtatttgataactgctgtcgggggtctgataagtgcaataactcttttttataaggcgttcagtagtagtaagcaaaatacacttgctggcatgttggctgaaaaagataacgaaattaagcaaaggactgaagatatggagctgtaccgaaaaagatggctcaaggttgaaaaggaaaacgacagattaaagaagaaattggaggaattagacaatgacgattaaagattggatttacttgggaattactgtagcaagttatattatcgctgtaattgctggcgtttacgctaaggacaaagctaagatcaatcgtgccacgcgtgctggtcaagcctacgatgtactaggcaaagttgcgactaacgctgtacacgaagttgagttcttgggtggtactagtaaggaaaagcgtcaaatgggttatgaactgattaaccaagctttgcactacatgggtattaatgatgtgacagctaacatgatctacggcgctttagaaaaggctgtagctgctatgaatttagctgatgttgaaaaaatggaaaatgatcctgctgtagcacaagatgtggatgaaaaagacatcctacaaccagtagatcaattgccaaaacctgaaaatccagctccaaccgatgctaaggatgtgactttagatggcaagtagacaactaggtattgatgcagctgtatatcaaggcactagcatgacagcttatcataatgctggtgcaaaatttggcattatcaaattgactgagggcacgggctatatcaatcctaaagctcactatcaaataaaatcattacatgctaatcatatgtacgttcatgcttatcactttgcgacttttggttataacgttagtcgtgctaaagctgaagcaaagttttttgtgagtcgtgctaaagctgaaaacattagcaagaaacgctatttatggcttgactgggaaactggtagtggtaactgcgttactggaggtaaggtggcaagtactaaggcaattttagcttttatgaaaatttgccacgatgctggttataaagtaggcttgtactctggtgccagcctgcttagagctgcaattgatactaaaaaggtcattaagaaattcggcacttgtatctgggtagcatcatacccaaccgacttagcttataagccagactttagctatttcccttcgatggatggcgtagctatttggcaattctgtgataactggtgtgggcttggcgtggacggcaacatcagcttgattgacctccacaaagaaactacgactgtacataaggcagccaagccaaaaccaaagccagaaaagaaaactggtgtagtatgtgcgccgattattaactgcaaccctaactggatgatccaactaatggatagtaatggttattacactggcaagtacatcaagacaaatacgagatggaagtacttcgatgtcaagaatatcaagggaatgaaatgctataagttaggtactgataggcagtgggtacctgctaaattcttaaaagtaattgaatagaaggagttgaaaactccaggtgtcgtaaagaccgctctgggacaatgatcctagagcggtttttttgcggttttagttaaaaaatgctgcatatatactaatatgagtatataatataaagagtaaggagtaatgagatgtgctcaggatccttacgaaggtggtggtatccaatgaagcaccgcaaacgtaaacgcgtttctattgaagctcgctacaatagaaaaacagcaattatcaatttgataactgctgtcgttgctctaattgcttcgattgttggattactccactaatccaacacatgagggatcatctcccttgtgtgttttattatactataaattatgaaagtaggtccagaaaatgaatgatgaagaaaagaaatacaataaaactacttctaacattaataaaatagcgttagcaatctttgttatagcagtaataattttcattataggattggtgaagtaagatgtcagttagtgaagcacaaaaaaaggcaaccagaaagtgggataataaaaataaagctcgaaagcaatacttaaatcgcagatcggttaccaaaaattttattttgaaagaagctactacagaagatctggagcaaatcgagaaatatattgagcaaaaaagaaaaaagattaaaaatccagagtagtttaatgaagtatattgtttgtgaggtgaaacgatggattacttgaacggactaatcgaaaaagacagatacgaaacttatcttacaagaaaaaatattttagaagatttaattgaacaaaccttcaaaattcttaagtcttccactgattctaatgaaatcaaagaagaagctaaaaagttagtaaactatcgtttacagctgatagatgtaaacgaatatcttgaaaaaagtaaatagtggtttactatcgctaacagaaaagaagccatcttagagggataacctctgagatggctcttttgatagaactttgatagaaataaatgaaatgcttagaaaagttataaaggatatttgcttatataataaggaagaaaaataccagtaaatacagagaaaaagaataaataaaactctctgtctccgctatatagaaaagtaactgttctagattaatttctagagcagtttttttgtgtaccgagcggcattcttagtccgatgaaagtgttagaactaagagccagtagcaatgatattatgagtatgggacgtttacaaaggagtaaatacctgctgaaacagtaaggaattacaaatgtatcgtcttatatgcaaccatatgtatagtggatggaaggagatgagttcgttaagttctctctgcattgaaaacacgtcataagatgttaaaaccttaattttgagttattgataaacctaaatgcatattattttgaatgacttaatggaaattattacacttcttttaggtaaaagtcttggacattgattcaagtcaataatcgtgtatataacatagggagagccgattgttttaaatttcttcttgtatgatctatattaaaaaaataattttgtgggggatttcatagtgatataaagaagcagtttaatatggaacaatttataaagatcatttagttaaagataagagaagctgttttgctctagctaattttaagtattaagatagatataaatgttttacaacaaaaaaataaaaaagtacttgcattttgactgaatatctattaatattaaatacgttgtgattgagagatcacaatagtaatagctaattaaaaaaataaataaaaagttcttgacttttgaaatgtgattagttattataataaagtgctcttgagtgagttacatgacccgttggtcaagtggttaagacacggccctttcacggccgtaacatgggttcaaatcccgtacgggtcattgccacaatttatttttttggcattaagcaatggaggattacccaagtggcttaaggggacggttttgaaaaccgttaggcggttctgccgcgcgtgggttcaaatcccacatcctccttagttgaatatcgcgggatggagcagtctggtagctcgtcgggctcataacccgaaggtcgttggttcaaatccagctcccgcaatttggtccattggagcagtggtttatctcgcctccctgtcacggaggagatcatgggttcaaatcccatatggaccgtaagatggctcggtagctcagttggtagagcaaaggattgaagctccttgtgtcggcggttcgattccgtcccgcgccatcatctggaggagtagcgaagtggctaaacgcggcggtctgtaaaaccgctctctctgagttcggcggttcgaatccaccctcctccataatagggatatcgtataaaggtagtacatcggtctccaaaaccgctagtgtgggttcaattcctactatccctgtttaccttcatggcggaattggtgaaggggttaacacactggtttgtggatccagcatgcgtgggttcgattcccacattccgccctagtattgggatatagccaagtggtaaggcattagactttgactctaacatgcgctggttcgaatccagctatcccaattctaaataatttcataacttatggcggtgtagccaagtggtaaggcagaggtctgcaaaaccttaatcgtcggttcaaatccgacctccgccttatcaaccgaataagttgattattttaaaatttaatattatggcggtgtggcggaattggcagacgcgtcagactcaaaatctggtgtccattacggacgtatcggttcgaccccgatcaccgctattattatgaagcgatccaattattggatcgctttttttttattttaaaatgttagcattttattatataaattgcacatgaatacaggaatctttataatgctacatatggaggtactcaaatgaatattggtctttataccgatacatattttccccagataagtggcgtagctacttcaattaaaacgttaaaagaagcgttggaaaagcaggggcataatgtatttatttttactactactgatccgaacgtgaaaaaaggaactgtagaaccgaatgtatttcgttttagcagtattccttttgtctcatttaccgatcggcgaatagcatttagaggactatttgaagcaaccaaagtagctaaagaagtcaatcttgatatagttcatactcaaactgaatttgcattaggtactattggcaaatatgtagctcatcaattagatattcctgctatccacacttaccatacgatgtatgaagattacttgcactatattttaaatgggcatttgcttcgtccatatcatgttagacaatttgttaaaagctatttgaaaaatatggatggatgtattgctcctagtggccgagttgaagaattattacggcgctatggcgttcaaataccaattagggtgattcctactggagtagatttgcagggcatgaacaacgatattcaacgtgatgtgcggcaagaacttggaattgatcaagatgcgcctgtaattttaaccttaagtagaattgcagccgaaaaaaagattaatcatattttgaacgtaatgcctgaaattattgatgaatttcctaatgtgaaatttgttatcgcaggtgatggccctgatgttgatgtgttaaaggatcaggtagagcgattaacactagagaattacgttatttttgtcggtaatgtagagcatggcgatgttggtaattattatcgaatggctgatctttttgtttcagctagtgatacagaaacacaggggttgacttatattgaggctctagctgcaggtacgccatgtgtggtttatgacacagactataccgaaaacatttttgatcaagatatttttgggcagacatttactacacaacaagaaatgttagaagagattattactttgcttaagcaagggacgaaaagaatcccgcaggaacttttgcaaaataaattacagaagatttcagctgatcaatttgctaaaaatgtgtctgatttttatcagtatgcaattgatcactatcaacctaagcatgatgaggagactaaaaagaggaactaaatgattagaattaatatgttctcgcaagctgattctgttaaaggacagggtgtaggttcagcttataatgaattgattaaacttctgaggacgcacttagtagacgaattttatgtaacgattaacaaatatggcaatagcgatttaacgcattatcacacgattaatccaacctattacgcaaatagttttttaccagcacgtggcaggaagattggctatgttcactttttaccagatacattagaaggctcaattaagttgccaggcgtagctaaaaaagttttttatcaatatgtaattgatttttataaacgcatggatcaaattgttgtagttaatccaatctttattgataagttggttaactatggaattgatcggaacaaggttagatatattcctaattttgtttcaaaaacagaattttatgaagaatcattggccagcaaaaacgcatttcgtcatgaattaggaattccacttgataaatttgttgtttttggtgatggtcaagtacaggaacgcaaggggatcgatgactttgttaagatggcacaagctaatcctgatattcaatttatctgggcaggcggtttttcgtttggcaaaattactgatggctatgatcattacaaagaaatggttgacaatccacctaagaatatgacgtttgcgggaattgtagagcgagagaagttagttaagtatttaaatattgcagacttatttgttcttccatcatatgatgaattgttcccaatgtcagttttggaagcattcagttgtggaacaccagtattattgcgtgaccttgatctttataaggcaattatcgatggctattatctaagcggaaaagattttggcgaaatgaatcaagtattgcaaaaagtagttgccaatccacaaactttgcagaaatacagcgaattatcgcgtaaggcaagtcaacagtattcagaagatcatttagctaaaatttgggacgaattttatcatgagcaatatgaattaggaaaagagctaggtcaaatacattaatgaataaaaaacatttgtggggcattctggttgttttagcaatcagtgcctttgtgctatatgcagatttaaaagctacaccgatatcggaaatattacgggcagctcatggcctgaatatttttggattaatcatggtttttgctttaatgcttttgtcctatgtatgtgaagccggtatcttagctactttagctcatcgaaagaaagagcctaaaaggtcagcttggtcgtttttgcgaattccaattattcaagctctatttaatgcaattacaccaatgtccacgggtggacaaccatcacagctagccgcaatgattcaaatgggcatggaaggtggccgttccacctcaattttgctgatgaaatttattatttatcagatcgttgttttgtttgcctatgtatttacaattatttttggctttcatatggtaatgactaagttcgctggtttagcaatttttattgcaattggctttttgattcatgttagttcaattatctttttgcttgcaattatgtttgcttatcgttttactaaaaaggcaactaattggttaatggacttgttggcaaaaatgatgaaaaaggaacgagttgagaagtggcgtaaggctactttagaaaagattgatactttttatgcagagagtcagaaactaaaaaaagaaaagaagaaattatttgttgcctcgcttttaacagtattgcagctacttttcttttactccgttccatttatggtattaacagcgctaaatgtaccttgttcttggtatcaagttacgcaaatgaatataatgattatcatgtttatggcgatcattcctattccaggtgcgtcaggaggggcagaatatagtttccaaacgttattctccaccttcatttcttcacatggtgcgttaattttggctatgtttatttggcgcttttcaacatattttttcggtatgcttctcggcatcttaggctggatttttaagccgaaaaagataaaaagcacaaaaatgattaatttttattaaaacaacggtgtcttactaaatttcgtagtaagataaattaccgtaatgagaggagcagaagcgcgtggaacacactaaatctttttttaggtggctgacacagactaagttaggcttttttacgattgttttagtcttgttttggcttaaaacttattttatctatttaactaagtttaatttaggagcagttggtccaatgcagcaatttttattgctgattaatccgattccttcagggatgcttttgctgggaattgggctattttttaaaggacgtaaatcctattggattattttagttatcgattttttgctaacactgtggttatttgccaatattttatattatcgcgaattttcaaactttttgtcattttcaattattaagacatcaggctcgacttccgataatttgggtaaaagtattgcaggaattacactagctagcgattttttagcttttgctgatattgctgtaattatcgtgttattggcgaccaaagtaattaagatggatgttcgtccactgaagctaaaagttaatttgttaattgaggctttggctgtcagcttaatgggactgaatttattgatggcccaaaatgatcgttctggacttttgacgagaacttttgataataattacatcgtcaaatatctgggaatcaatgaatacgctatttatgatggctataagacagcacaaactagtgcacagatggccaaagctaatgtttctgatttgaagtctgttagaaactatttaaaagaaaattacgttaaacctaatcccgcttacaccggcgtggctaaaggaaaaaatgtgttaatcatccatttggaaagttttcaacaatttctgattggctacaaatggaaaggtaaagaggtaacgccaaatctgaataagatttatcatcaaaaagagaccattagttttgataatttctttaatcaagtaggacaaggcaagacttctgatgccgaaatgatgcttgaaaattctttatacggactacaatcaggtagtgcaatgtctacgtatggtacttctaatacttttgaaagtgctccagccattttgcatcaacaagctggttatactactgctgtaatgcatggtggtgctggctccttctggaatagaaataatgcttataagtcatttggctaccaatactttatgccactgtctttctatcagaacaaaccaagctactatatcggatatggcttaaaagataaaattttctttgatcagtcaatcaagtacattgagcgtttaccacaaccattttatttaaagatgattactgtaacgaaccactatccgtataatatcgataaaaagaatcagacgattgataaaacgaatactggggatgaaacagttgatggttatgtgcagaccgcgcattatttagaccaagcaattggtgaatttatgcgttggatgaagaagacgggcctagataagaagacactagtagtattttatggtgatcactatgggatttcaggtaatcaccataaggctagtgcagaattgcttaagaaagattcgtttaatgactttgataatttgcagttccagcgagttcctttgatgttccatatgaaaggactaaagggtggcattaatcacacctacggcggtgaaatcgatgttttaccaaccttactgaacttgctggggatcaaagacaaagatacgatccaatttggctatgacttgctaagcaaaaatgcaccgcaaattgtagcacaaagaaatggtgactttatcactccggaatattctaaggtgggtagcgattattatgacaccaagacgggcgaaaggatcaaacctaataagaaattaaaagaaaaattaactgcaatttctaacaccgtaactacacagctgtctttgtcagatcgtgtaattaatggcaatctgctccgattctataaaccaaaagggtttactagagtcaagccgaaggattacgactataacaaggcgccatctttaaaacgtttgtttgatgatccaagcaaaacttcactgtggtatcaaaatcatcgtaaaacgacgcaaaaagatttcaagacagatgcgcctgaactaaaaaaataactgcaaaaactagtaatttgtgataaacttggtaagtaaatcgtatgtgtgtattggaggcagcgcattgtataatttagttatgacgctactaatcattgtttcaatcttaattgtcattgcaacaatgatgcagccacaaaaacaacaagatgcattgaacgccttatctggcggtgccgtttttagtgggcaaaccaaaaaacgtggttttgaagcatttatggaaaaagtaacctcagttttattggtactctttttcgtctttgctattatcttagcttatatgtcttcaaaataaattttgtacctcccgatcaaaatatgatggggaggctttttttattaaatttaaagatcggagaataactgcatggcacaaaacgaaaaaattttggccggcgttttagaaatttttcgccataatccacaaaaacaatttcgtgtagatcaaattgaacgtgaagcacgtcgtgatagattaggtaattttactgaattaattaaggctctttcttttttagagcacgataaaaagattattacagatggcaaaggacaataccaattagctcaagaaaatactgaagttgaaggtgaatttagagctaatgataaaggctttggctttgttagattagatgatgaaaatgcggacgacgtctttgttgccgcagattataccaagtatgccgttaatggtgaccgagtaaaagtaaagatcactgctggtggtaatccttggaatggtaagggaccagaaggtcaagttgaagagatccttgaacatggtttggaaacgttagttggtgaatttcatccgctaactgatgaacaaagaaaaaacagtcattttatcggctatgctttgagtaacgataaaaagttgcataaataccgggtttatttgtctgaaaatggcttgatccctcaaatgggcgatatggttaaggtctcaattaaggattatccagatgaggaaaatcctgagtcaatgactggtgcagtagtcaacattattggtaataaaaatgaccctggcgttgacattatgtcaattgtggcagcacatgatgtaagaactgaatggcctgaagatgcaatggcgcaagctaatgctattcctgatcatgttactgaagaggaaaaaaagggtagagtagatattactgaccaacctgcagtcactatcgatggggatgattctaaggactttgacgatgctgtagttttatggaaaaagcctaacggcaattatcaccttggtgttcacattgcggacgtttctcactatgtgacagaaaatacgccgttgaacgaagaggcatttgctcgtggcaacagtacttacttagttgatcgggtaattccaatgctgccatttagactttctaatggaatttgttccttaaatgaaggcgtggaccggcttgttttgtcatgtgacatggaaattacgccagaaggtaaaagagtaggttataaaatttatccttctgttatgcgctcacatggtcgaatgacctacaacaaggttaacaaaactcttaagggcgaaatgaatggtttagaggataagtatgttaaactccgaccaatgcttgaagaaatggcagatttgcatgctgctttgtataaacaacgtcatcaacgtggtgctattgactttgaagaaccagaagcaaaaattattgttgatgatcaaggcaagccaacagatattgttttgcatgaacgtggtactgccgaaaagatgatcgaatcatttatgttaatggctaatgaaaccgtggccgaagatttcttcaaaaagcatgttccattcttgtaccgtgttcacgaaacaccagatgccgaaagaatcaagactttctttgaattttgtagcgcatttggcttgaatattcatgcggatccaaataacgttaagccaattgatttacaaaaagtagtttctaaaactacagatactccagaggaagctgtagtacaaatgatgatgctacgtagcttaaagcaagcgcattattcagaagaagcactgggacactttggcttagctgcagaatactatactcactttacttcaccaattagacgttattctgacttgatggtgcaccggatgatccatgcatatcaagaccaggggactaatgaagaagtgcaaaagcattttgctagttacttgccagatgttgcagaacaaacttcaacgcaagaaagacgttcaattgatactgaacgtgaagtaaatgacttgaagatgacagaatatatggccgatcaagtggggcaacactttgacgcggtagtatcttcggtaactagttttgggatgtttattcaattaccaaatacgattgagggattaatccatatttcgaatttgactgatgatttttacagttttaatgaaaaagcattgacgctaactggtcgaggtactcataagcaatataaggtagggatgccaattaaggtaaccttgattaatgctaacgttgaacaacatcagttagactttgaaatatatgatcctaatgcgcctaagcataagcataacgatcgcggaatgaataatcgtcgtcgtggaaaccgtggcttccgcaataatcatggacgccgtggtggtcagtttaataatcacagcgatcatggccgtggccgaggtaatggaaaccgtggaggtcggagaaattttaaacattagggattgatcttaatgaaaaaagaaaaagaagataatttaattgcacaaaataaaaaagcacgacacgactattttattaaggaaacattggaagcaggaattgctttaactggaaccgaaattaagtctgtacgagctagaagaatcaacttgcgggatggttatgtgcagatcgtcaacggacaagcctggctagaaaatgttcatattagtgaatataagcaaggcaatcggtacaatcatgagccactacgtagtcggcgccttcttttgcataaaaaagaaattgcacgtttggccaaagcacaatcagagcgtggtattgcaattattccacttaaagtgtatttaaaacatggctttgccaaggtattgattggtgttggccaaggtaaaaaggaatatgacaaacggcaaacaattaaagaaagagaccagaagcgcgatattcgacgcaagtatggtgtctaagatgagtctgagaagaatctcagactttttttgttgaaaaattttaaaaagtttttttattttcacaaagtaatgttcgaacaatttgaagaatgcagagaaaatcaagctaaatatttttttaattattatagaggcgaataatagtattaagatacgtttgatattgaaatattcatattaaaaatccgaacgaagagcaagacttgccaaagcggagaaaataaggtaaattaataaagtcgcttcgagagatgcgacgagagcttaaaaacagacatgcaaggaaagaaaacaaataaaaagaaaaaaagtacttgcaaagaagtaaataagctggtaatatatttaaatgtcgtcaggtgaaagcagaaaaagcttgagtaagacgaaaaaacaaatcaaaaaagttcttgacaaagaaatgatggtttgataaaatatgaaagctgtctgctttgcaaaaaagcaagacagaggtagtactttgaaaactgaacaaagtttcgctaaaagtgtgcgggtgtaaaaacccaaacaagaagcgaagtcaattcgcgagcaataaatttgagacaaagatcttaaataaggaatgagcaatcattcaaactttttaaaatgagagtttgatcctggctcaggacgaacgctggcggcgtgcctaatacatgcaagtcgagcgagcgaaactaacagatttacttcggtaatgacgttaggaaagcgagcggcggatgggtgagtaacacgtggggaacctgccccatagtctgggataccacttggaaacaggtgctaataccggataagaaagcagatcgcatgatcagcttttaaaaggcggcgtaagctgtcgctatgggatggccccgcggtgcattagctagttggtaaggtaaaggcttaccaaggcgatgatgcatagccgagttgagagactgatcggccacattgggactgagacacggcccaaactcctacgggaggcagcagtagggaatcttccacaatggacgcaagtctgatggagcaacgccgcgtgagtgaagaaggttttcggatcgtaaagctctgttgttggtgaagaaggatagaggtagtaactggcctttatttgacggtaatcaaccagaaagtcacggctaactacgtgccagcagccgcggtaatacgtaggtggcaagcgttgtccggatttattgggcgtaaagcgagcgcaggcggaagaataagtctgatgtgaaagccctcggcttaaccgaggaactgcatcggaaactgtttttcttgagtgcagaagaggagagtggaactccatgtgtagcggtggaatgcgtagatatatggaagaacaccagtggcgaaggcggctctctggtctgcaactgacgctgaggctcgaaagcatgggtagcgaacaggattagataccctggtagtccatgccgtaaacgatgagtgctaagtgttgggaggtttccgcctctcagtgctgcagctaacgcattaagcactccgcctggggagtacgaccgcaaggttgaaactcaaaggaattgacgggggcccgcacaagcggtggagcatgtggtttaattcgaagcaacgcgaagaaccttaccaggtcttgacatctagtgccatttgtagagatacaaagttcccttcggggacgctaagacaggtggtgcatggctgtcgtcagctcgtgtcgtgagatgttgggttaagtcccgcaacgagcgcaacccttgttattagttgccagcattaagttgggcactctaatgagactgccggtgacaaaccggaggaaggtggggatgacgtcaagtcatcatgccccttatgacctgggctacacacgtgctacaatgggcagtacaacgagaagcgagcctgcgaaggcaagcgaatctctgaaagctgttctcagttcggactgcagtctgcaactcgactgcacgaagctggaatcgctagtaatcgcggatcagcacgccgcggtgaatacgttcccgggccttgtacacaccgcccgtcacaccatgggagtctgcaatgcccaaagccggtggcctaaccttcgggaaggagccgtctaaggcagggcagatgactggggtgaagtcgtaacaaggtagccgtaggagaacctgcggctggatcacctcctttctaaggaagcgaaggatatggagagcaggaatgctaagagaagtatccagagcaagcggaagcacactgagaaactttgtttagttttgagggtagtacctcaaaaagagctagtacattgaaaactgaatataatccaagcaaaaaaccgagacaatcaaagagaacagattgtagagcgaccgagaagagaattcttgagtaaggtcaagtagaaaagggcgcacggtgaatgcctaggcactaacagccgaagaaggacgtgacgaactacgaaaagcttcggggagcggtaagtacgcagtgatccggagatatccgaatgggggaacccaatgcagagatgcattattgattagtgaatagatagctaatcaaaggaagacgcagtgaactgaaacatctaagtagctgcaggaagagaaagaaagatcgatttccttagtagcggcgagcgaagaggaaagagcccaaaccaagtgatttatcatttggggttgtaggactgcgacgtggcagtgtaagagatagttgaattatctgggaaggtaagccagagagggtgagagccccgtaagcgaaatctcaagcacgcctagcagaatcctgagtaggccgggacacgaggaatcccggttgaaaccgcgaggaccatctcgcaaggctaaatactagttagtgaccgatagtgaaccagtaccgtgagggaaaggtgaaaagaaccccggaaggggagtgaaaaagaacctgaaaccgtgtgtctacaagtagtcaaagcacattaaagtgcaatggcgtgccttttgtagaatgaaccggcgagttacgttatctagcgaggttaagtcagaaaagacggagccggagcgaaagcgagtcttaatagggcgaaaagttaggtgacgtagacccgaaaccaagtgacctacccatgaccaggctgaaggtgtggtaaaacgcactggagggccgaacccacgtaagttaaaaattgcggggatgagttgtgggtagcggtgaaattccaaacgaacttggagatagctggttctctccgaaatagctttagggctagcctcgtggagaggataatggaggtagagctctgtttggactaggggcccgtcaggggttactgaatccagataaactacgaattccagatatccatacacgggagtcagactgcgagtgataagatccgtagtcgaaagggaaacagcccagatcaccagttaaggtccccaaatctatgctaagtggaaaaggatgtggagttgcgtagacaactaggacgttggctcagaagcagccatcattcaaagagtgcgtaatagctcactagtcgagtggcgctgcgccgaaaatttaccggggctaagcatagtaccgaaactgtggatgtgttttaaagagcacgtggtaggagagcgttctaagagcggagaagttgaatcgagaggatcaatggagcgcttagaagtgagaatgccggtatgagtagcgaaagataggtgagaatcctatccgccgaaagactaaggtttcctggggcaggctcgtccgcccagggtaagtcgggacctaaggcaaggccgagaggcgtagtcgatggataacaggtagagattcctgtactgtgtcaaatcgttaagagcgaaggagggacgcaggaggtgaagcacgcatcgcgatggaacgatgttcaagcaacaagtgcggttaagagtcaaatgcttctaaccagcaacacgagttgtgaagaggagtgaattaaaagtagcgaaggtgtggtaatcacactgccaagaaaagcttctagccagagatgacatacccgtaccgcaaaccgacacaggtagtcgagtggagaacactaaggtgagcgagagaactctcgttaaggaactcggcaaaatgaccccgtaacttcggaagaaggggtgctagccaagagattggttagccgcagtgaataggcccaaacaactgtttatcaaaaacacaggtctctgcaaaatcgtaagatgacgtatagaggctgacacctgcccggtgctggaaggttaagaggagagcttagcgtaagcgaaggtttgaattgaagccccagtaaacggcggccgtaactataacggtcctaaggtagcgaaattccttgtcgggtaagttccgacctgcacgaaaggtgtaatgatttgggcactgtctcaacgagagactcggtgaaattataatacccgtgaagatgcgggttacccgcgacaggacggaaagaccccatggagcttcactgtagcttgatattgagtatcttttaaacatgtacaggataggtaggagccagagaagataggacgctagtcttattggaggcaatgttgggatactacccttgtttgaaggatgctctaacctcgacctgtaagccaggccagggacagtgtcaggtgggcagtttgactggggcggtcgcctcctaaagtgtaacggaggcgctcaaaggttccctcagaatggttggaaatcattcgcagagtgtaaaggtataagggagcttgactgcgagagagacaactcgagcaggtaggaaactaggacttagtgatctggtggtaccgtatggaagggccatcactcaacggataaaagctaccctggggataacaggcttatctcccccaagagttcacatcgacggggaggtttggcacctcgatgtcggctcgtcgcatcctggggctgaagtcggtcccaagggttgggctgttcgcccattaaagcggcacgcgagctgggttcagaacgtcgtgagacagttcggtccctatccgtcgtgggcgtaggaaatttgagaggagctgtccttagtacgagaggaccgggatggacgcaccgctggtgtaccagttgttccgccaggagcatcgctgggtagctatgtgcggaagggataagcgctgaaagcatctaagtgcgaagcccccctcaagatgagatttcctttgcgtaagcagtaagacacctcagagacgatgaggtagataggctgggagtggaagtcctgtgaaggatggagcggaccagtactaatcagtcgaggacttgaccaaagcgaagcaaactggaaggttttttgcgagaaggattatgtttagttttgagtgtaaaagctcaaaagagtacggtggcgaaagcaagaaggatacacctgttcccatgccgaacacagaagttaagcttcttaacgccgaaagtagttggtgggcaactgcctgcgaggaaaggaagctgccgtgctcttttttaatattccggcttagctcagttggtagagcgcttgactgttaatcaagatgtcgtcagttcgagtctgacagccggagtactttgtatggaatgttgtccgagcggcttaaggagcatgattggaaatcatgtatacgggcttatacctgtatcgagggttcaaatccctcacattccgtaattataagctcgtaagtgttgatcttacgggctttttgatatattgcggtctctaaaaggtctccaacctcccaaaaacggctaaatttcatctagaattgtaactatttgtttatccgatttttgttttaattcgtccagcatgtaagcatatgtattggctgtaatgctcatattggcgtgtcctaaacgtttacttattgaataaaggtcaacacccttaaagagtaacatagccacgtgagtatgccgtaagctatgaaagtgaaaaccttttttattaatattaagctttttaaaatatttgcgcaacactttattaacggcacttgaagttggaatggttccatctttgccaataaataatctttcgtgaccgttctgttttagttgactaagaatattgagtaaatgctgatctactttaataacgcgagtagaggaacggttcttagtttctttgtcaatttcatctgaatcataatcaataattttgttattatcataattccatgattttgaaatatggatagtgcagtttttaaaatcgatgtcgtgccaagttagtactctgatctctcccgggcgcatgccagtataaattatagtcaaaagcatatatctactgatgtaagcaggggtaattccgtctaaaagcgattttttgagctgctgaacttggctgaaatttagataatctatttttctactgcgttcattattccaagtcaaattaattctttcggtaaaattaattcttattagtccctcgcttatagcgtctttaacgctagttcgaatacttccattagtcttatataccgtaccttttacgtgcgtttttccatacttattcataaaatcttgatatttgtgtctagtaatttttgaaattttagttttgccaaaatactcagacaaattatcataaataactttatatctattcttagtggtgtttgaagtgccaggcgttttataggtctcataccagtccttaaagtattcagcaaaaattggatcttggttagatatttgattgtcgtcttttgcaacttccatctcattagcccattttctggcggctgttttggtcaaaaaaccttgcttgcttttaaatctacgctttccgcgaacatcgtaccaggaaactttagcgcgccacgtgttgccccttttttgtaagtaagccataatttaatcctctccttattaataaagcccgtttactcagttgagtaggcgggctatttttattctccttccttgtttccatcagtatcccaaattccgtatccatttccatcagtatcaaaaaatacaatatctgctttagatatattgccaggatatggcgctaaacgattataagcatcgctaatatcgtcaacaatggatttttgaattaaagttcgttcatctttagtgtcctgcttaataaaactttttgtgaaagtaacttcaatatgccccgatcccatgacattaatgctatcaatagtatcgccaccatatttttcagaatctaaagagctcaattgtttctttaaagtagtaagatgttctttttgaacttgtttgcgcagggatttattgctaggtactccagtttttttcgatgatttagaactgctactagattttttagaattaaattctttatcttgctttttagctattttatccattttcttttcaaattccttttcggattttgactttttcttagttttatgagacgtaggctttgattcggttgtttgagctttaggttcggttagcccacttacaactgccatacaaaagaaaatagcaatagaggaaatgattgtgatggttccatatttagaatctttaatatttaatttctttgctcggctgtgccgatatattgcaaaaacaattggcaatataaaagataaaaatattaataatacgtgcatttaaatactcctattcttcaaatctatatctatttaattcttcctgaacctgtaaataatcttgtgtcccaatacttttagcgatgtttagccagttagcatcttgaatttcatttcctaatgcaaaatactgcttaactttttcgtgaatcatgaaaacatttgctccgtgttcactgcaggaatgagcaccatcatccgtttgatagtcgcctaaaacatcgccatcatttttagcatgtccgatttcatgaagaataacgttttctacttcgttgtcatcaagcttagagttaactactaccacatcgggcttgccatctttgccatgaactattaagccagggcaatgtaaaggggcaaatgcaagctttaatttatattttttgagtaatttactaacattggtatccataaataaacaccttatttttcgctgtaaatccttttcaatatacctctaactaattccctgtcatgttcgtctaatggcttgccatcaaaagagcgggcatcatctagcatgtcatctaaatcatcatttacttctttatcgtttggtgctggattatcaactttaccagctaagtagtccacactggtatcaagtattttagccagtttaactaaagtgtccatgtctggatcattgtacccgtactcccaattagcgtatctagggaggctaaccccaatcatgttagccatttgtgttttgctgtaattgtgatcttccctaagattagacaaacgttcattaaacttcattttgctacctccttatttaacctacatatttattttagctttgatacagtaaatatgtagaaaaataaagaatttctttacaaaagtatttacattatataaattctgtagtagtataaagcatgtaaagagttacagaaaaactttataaaggagatgagcgaatgacacaggttactgttgccaatgctaatgaaattttaaagcaatatttaaagtctcacggtattacacaaaagtttgtagccgataagatgggggttaatcgacaaacctttaacgcttacgttaatgggctaatcaggtttgatgccgattttgcgttaggggtttcagaagttctcggtatttctccttcgatttttttaaaagaaaaatacagaaaatctgtataaggggggcgagttaaatggaccaattaatcaatacttcaattttgaagaagttagttaagcagattgttaatgaatcaatcaaagacaatcaagacgacttaacgggtaaaacttggagcattgatgaatttagaaaaatctgttgtcaaggtaagggtaagagttgggttagaactttcatctttgacgaatacccggaagttaacgtcaagcgtggcggatttgtagtaaatcctcgcaagacagccgagggtagcagaacaatcatctttgcaaaagaagcttgtgaatggatgcagaagcaccaacatgaaattgattggaacgcgaaagtcccagtttaggaggttaaaaaatgacagtagttacagataaaaaagtttacgagattgcaaaggaatttggcgtgtttgacgacaacccggatcaattcaacattaccagcgatgaagattatagattttacctctggctaaataacggttcactagtagcatttgaacctggctataaaggcttgcaagacttgctaagtgaagtgatggttaggttctttgaaaatcgtaagaagtcggaaaagacaacggaactagttaacgcagctcgtaggtcggtaattgattactgcattgaaaacggcaagcaagttcaaagggagaaagcaaaatgagcaaagaagaatacgaaagagagttcggcaaaactaagttagatcacgttttaagtcatatgactaaagcatttggcaagtttctagaattcttagcaattctattcttaccactaacagttgcggagcaggtttgcatttatggcacaactcaccccgatcaagtcatttcgctgttactagtcttaatgattattttgacagcacttgcggtgcattccgttaagaaacttagaaagtaggtgaagtatatgagtaattcagcagccttcaaaggccgtttgaagcgaaccagacaaaacaagaatttaacgcaaaagcaactagcggaagccgtaggacttggggctcgtactattggacggtacgaacaaggctctagttttcctaacgagcgagtacttcatgaacttgcggaagttttaaaagttaagactgactggttatcagcaaagaattaagacttttaaagaagtgattaaggagcaactggaggactaatgaagctatggaatcaacttataaacaaactttttcaagtggacaaaagaatcaacttacagacttccaacgcagtgttcttgctaatagtaatgctatcagcactgctagtggggatttcgctagattgacaaaagaagttaaaaagtttcttggtttagcaaaacaaaaagccctctactgctagagacagtaaagggtgttaaacaaagaaaaaatatttcaataaggagattataccacaatggaaacgttaaatgcagaacaagtaaaagaagcaaagtacttgtacgaaaatcaagcactaaaagatctatcgctagaagagccagacgcaattcttttctgggatggcgaagagcaagcattaattacaaaaaatgctgacgactttgacaatgcttatgaaaagccaatggatttcttcatgaaaaaggtaaaccaagactataaaggtgatttgaatcagcttgcaaagtcactcggatatgggctaggtaaagcaagcttttcaatgggtgatttcttagccgattggtacgacctaaatgaagatacgctaagaggattgatcattgactactttgacggcgaagaactaggagatatttacgatgactaataatgaattaatccaatttgatggtattgagtacccagtaagctataaaccagctgaaatcatttttccaaaatacggagaaatgaaagacaacatcttaaaggttcacgatgaattcgctgattggacagtaacgccgcaaaaccttaaatcttcaaaagaagtaagaaagaatctcaataagcttaaaagaactatcaactcacaaagaatctcaattactagcggcattcaaaagccagcaaagatgtttaaagcaaacattgatgatttgatagcgattattgatgaaacaactaaaaatatcgattcacagcttaaacagtatgatgacaaattaagacaagataagcatgatcaacatgtcaaattcattaaacaggcttgtgaagatgctggtgtagatcctagcaagattagatataacgccagctggtacaacaaaacttatagcaaccctaaatttgaagctgaactgtatgagcaggttgatatcctgcgtaaaaataagcaacagctcgaaacaaataagcgaatcatcattcaaaaagccgatgaactaggaattccgtttgcccattacttcgagcaactgcaaagagaagtcccacttgatgaaattctcaacgacatgcaagcagaaaaagatgaactgattgaaattgctaaaaagcaaaaagaaacaaaaaagaaagagcaagctgacctagttaagcacggggacaaggcaattgacccacaaacaggtgaagttaaggaaaaaacttacacttttaggcttgaatttcaaaacgttactaagtaccaagttgatcaattgaacagcttcttaaaagactggggaattaaagcaaggagaattaaataatgactacaaaaaaacaagggtttagtgattttattgagccaaatcaagaattaattaagaattttgacatcaaaaagtataagaaaacgggcaatgaaccaaaactaaaaattcttacttatacgaatgagcagcagaatcgaatagataaggcttcatgggctatgcatctggcaatggtcaaaatggctattgtgcagccgaaaaaaacacacgaagttgaagttcgaggaaccactcaaaatggcaagccttatcactacacttacaagtatgctgatttagctgatgttgacaagtcaattatggatgctattaaagtcactaagcaagatgatgggccgctattgacttactacttcgatattgacaacggtgctgagggcgtaaccgttgaaactgtaattgttgatgcggcaacgggttacagtgtacgaactaataaagtatggtttaaaaacgttaatgttggtaacgcacaagcaacagcaagcctgatcagttatggaaaaagatattcgctttcagctgcgtttggtattgcaagcgaagatgacgatgacgcacaagcgcaaaaaatgaatcaatcacaagtagttgacgaaaatgctataaaaattatttttgaagattacgtcaataaccactccattaaggctaagaattggattaaaggcaagcatgataaagcgactggcgattatatcaaacagctactgggcgattatgaactcaaacatcatttagataaaaccaagcaaaaagcgattgaccgccgaaaagaaaaagatcaacaagttaaagaagcggccaaaaaaataaagaagcacaagccggaagacgaggtaattaaaaatattgtagataagcctaaggtagacccgttttctgataaaaaagaagatgctccaatgagtaaagggcaacaaaatttatttgatgacattttaggtgattaaaatggacgagtttaaaggtgcaaaagcatttttaatgattccaccatcaatatcaagggataaagaactcttaaaaaagcctaaatcaataattttgatgggagaaattatttcaatgcttaacgtaactggcgactttcacatgagtaacaaaacactagctaatattcttgatgcctcagttcaatcagttaatgattggcttaacctacttgaacaaaaagggctaatcataagggaacaaataacggttcctgctaaaaatcctaaaagtgagaaatcaaaaataatactaggcagaaaaataaaagctggtcctaacctagtaaagctgagtttactagggtgggcaagcccacttgatgagggtagtaaagctgaatttagtggggtagtaaagcccgctttacataaatataacaatttaatagatcatgataatagaacatctaattcttcttctggacgaagaagggaagaagacccagaacgtgaacaaatttataaacaatttttccaaattgcaagaatgaacgacaagatgaagcaaaaggctactaatccaacttatgacgagattaagcaactaagaagcttgctttaccgatgtaacattgacaccttaaaagccgttgtcagcaagtttgacatgaaaatgcaatggaacatgttaaatgacccgtttgcctacttgctaaagatgctccgagatgggttagcaattgacaaagattctgaaagctggggtaagtgatgaacaggttaaaagaaatgcgggaagttcgaggttatacccttgatgatgttgaaggtctaatgggcataaaaaggggaacgtacagtaattacgaaaatggtaatactgaaccaaagttaaaaacttggcaaaagctagccgacttctacggtgtatccgttccttacttgcaaggcagatatgaccacctaactaaaaaagaagccttgcgggtaattcatgaagttatgactgtttgcggcattagcaaagaagaactaaaggagaggctgtaaaaatgatttttgatttaacaattggttgcgtagtaactccccgccagctttctgatgtttttcaatacgcctttatgcggtgaaagcttggtgttgactacattcccaatagtcgcctttatgcgattgatacgcggaacaacggaaaaatccaagttacgggtgatcggaaaatcgtttacttgggacttggtacttggaaagtaaaggactagaacaatgactcaaagaaattacaaagaaaaaaatgttcaagaaatgaacatggaagatttaatcaatacggtaagcgatgacttaagtcgctatgacaagcttaaaacgcttgaaggcgttaaaaaagaaatgtcggtcggtttgtttagcaacaacttatctgaaagagggctaaaggcttatatcagattgctagagcttgaattgcggttagcaactacaagggaaccgatctttcatgattcacgtggttttggcgattacctagccggcaaatatgcggaacctgatcacgaagaaatgcatttgatcagtttaagcaaccaaggacaaatcatttctgatgatttagtgggttcaggaacggtagagaattcagctatttcagtgcccctaatcgttaaaaccttatgccttaatggggccgctaacttcattgtggtacataatcatccaagcggttcaatgaagccctcaaaagctgatttaaagatgactgattcaattaaaaatttgtctgagctaattaaagtacgcatgttagaccattttatcgttggtaatggaaattacttttcatttgctgagcatggtttactaggagattaacatgaaattttatctaacaagtcaaaagtacgcaaacagcaaccctaatttaactgcttatgaaattgaccagattagtaaagcctacttagggaagcttagtaacgtttgcacagttgaggtttggctaccgtctaagatcaaaaagacaaaatatgcgggagatggtatctgccgcggcggatcaatcgttattaacattgcagatgtacccacttggcaattttttagaaaaatgttgggtaaagccttccttatggttgctttaatgcaaccagactatccaaaactagtaattaaagatttatagaaacaaggtaaaaacaaaaaatgaatacaaagtacaattttggcaattgtaagtttaaagcaagtaaatttagtgaattggataccaacccaagtcactacaagaacagtagctttacacataaccgccctagttctttgaacagctatacaaagggcgtagcaattacttacgtaaacggtcaaacctttaagactaaggatgtaactgtagaaagcatttacgaagctttagcagaaaataacaactggcttcggctaaaaaacggggggtgcattaatttgaaccacgtgacgcactttgaaccgtataaattctttgaccgccctagggacgaaatgccagcaccgtggacggttggacacgcaccaaaagtgagaaacgatcacaatgcctagtgttctgtttcgggtaaaaagtcttgacggtgatccgcttatcaagattgttcttaacgaaaaagaaaagtacgagttgtactggctttatcctttcaaaaaatgtgctttaggtgagtttgataatttcactgaagcggaggttgcgttaggtcagtattacgggtttgaaaatattgaagaggttaggagttaaaatgcgtaagtttgtagctattgaggttgggccacggtccagcatggagttagatgttgaaggtcgttggctggtacggtggggtgttcctatcacgattaggggatttaaattcttctttataccaatggcaaacccaaaaaacgtgagaattgaagcttattcgcttgatagtttgaaaacttttgataggtttcacatttcacatgaagtagcttggaaaggttgctcaacggaagaaggctttattcggacggtcatgccgtttataactcgaattgataagcgtttggataatttagatgacgatggctggaaaacggtattcagggatgaatacatttcagcaattgcgcaatgtggcgcaagaaacaaaaaagaagctaagttactagaagattttaagaaacggaaatagcgatgaatgacttaaacgacttactagaaaatactaagtggtctgatatggggctagataaccgaattcgcgagctgacgcatcaggcgaagcaaattgaaaagcatgacgtgctagcgcccgaagattggaatgaaatcgttgttatgacttacgaccttagccgcttagcccttgaagtaatggattacgcaattgaacaagaaaaaagaggtataggaggctaaatatggatcagccaaaattatttgatttaccttttgatgatgtaaataccggtgatcaattttactgcgaagctacgaacaccacatatacagttgtttggatgtttactggcttctttaacggagctcttttagtaagaactcatttagacaccaacttttcggaagtttgcgattatgcaaagcaaaaaagtcataattctgcgatggaagaaatagctggaattctgcgggagcttgatcgacaggatcctttaaagcagataagaaagagaaagggttaagtaaatgaaaaaaattaaaatcgtatttctagcgtcaattatcgctgtaatgctgtccggctgtacgatgccgggatggtggaatagtgctatgacgaacactaacggtattgatacggggcattttaaggaggttgtggttatctattcggacaagagctctaagacctatagtgatgttagtgtgtatccctataacaatggtggtaatgattcgactggtgaaaagattgaaatccggcaaagaggaaaagttattgttttacctaatgacgcgcaagttgagttaagaaagaattaataaatatgaaagacgaaacagtaaagaaaattcagaaatcagtggaacgtgcggatgatatgacaattgcattagactatatcaaatctgcgatagtggttgactgtgccgaaagccttaccgcaaatgatggtcatgttttgactgatgaagaaatgcgagtagttaatgcgcgcttgcttatgaaagcactgaccatgcttgatgatcatgaaatgcatgaaatactttcgcgcttgaacaatgataaaaaacatgatgcacatactgaattgcttttaaaattgattgatcatgaattcgacaagctaaggcaagagcataaagacaatgattttttgaagaaggtgacacacaatgacgatgatgactagaaaactgatcacgtcagcggaccagctagttgacggcaagcaatatgcattagttcaaagggaattcactattaaggttacatttagcgaagtggtgcaccctgaacctcagccaggctattggactactgacgacatagcatgtgctcaatttattggcagaaaaggcataggctgcattgttggagaagaccgacaacggttatttgacggactaacagagataggggtgaaaatttatgaactgtaaaagattaaccggacatggacaagatgaaatgatgtttcattgtgataattgcggggaaaacgtatcaatagacacttacgatgttttaacggcagaagacaacttgcattgccctctttgtggcgcaagcgccggtcatttagctgtctatatgtttgatgaaaagaagctaagagaggattaaagggatgaaaattcttgatccagcatgtggttcaaagatgttttggtttgataagcatgagccacatactacttacacagatatacgtgatgaaatccttactgctaaggatcgtaaatacactaggaaaatagaaatccaaccggatcttgttgctgactttactaagttgccatttcgggatatggaatttcatttaattgtttttgatccgccacatctcaatgtagctggcaaaaatagctggttagcgaaaaaatacggcaggctagataaagacaactggcaagatgaattgagagcaggcttcaaagaattgtggtgtgttcttgcactagatggggtacttcttgttaagtggtcagataaccagatcccttttaaagacgttttgaaacttgttggccacgatccaattttaggggacaagcgagggcatacaagatggtttgtattcattaaacctaatgacacttatacatcaatgtctagtgtactaagtgataaagagctgaaagagcgggggataagccatgattgatgtaatcaaagtcctgctggtcatgttcatcgtcaccgcgatggtgtggctggcggcatatacggtattgactgcggtcaacgttttaaaagattggtggcgtagcaaatgaagcaagaagatgaaagtaaacttggaaaggttaatgaacttttgggtgaggtctatgggctatgttttgggaagatcactaatgctgagtacgaagttacgaatagctatacgcgtgctggaaaaattattttattcgttgattctgttaaaagccgaccaatgactttggatcgagcatttgaagcactgcgcaggaatttgcaagcaattaaaaataacgttacttgtactaaaaatggagcaaacatagctattttttacagtgacacgaggatagcaacgattatagaagcttttgatactaaaagtaatgaaaaaactctggctgttgatttggaaaaagaaattctatcagctgatatcgttgccaaaattgtaaatgctatcagttcgtataaagaactgtggttacaagcaaaggaggacaaaaatggcagacaaaagagtgatgaagcgtaaagaaggctgctatctttgtgggacgttgaacgcttatcacaatggacctggtttaagtccaacaagaaatttttcaagaataaaaaggcctcatatcggtcttaatgaatttgatggcaagtggtatttgatagctgatggggtaccttatccagtaaagcatttaattgcgggcgaaagcttgatgaaaacaccaaatttacagttacggatggactgcaatatttttaggaggtttagaaatgaacgataaagaaaagaaactaacagaagcactaaaagagtattttggcagggatgttggcgatgttgagggtgagcctaacttcatggattattctacgaaattaccgggtttggtgcatcctataaagcgtatcgtgatcactacggtaccttacaaaccaacttttgaagaaagacgtaaagagttggttgaccagctagataaggatttgaaagaaattgatggcgactttaatgtgaaaattaaaggggataggatttacatttatctttgtgcagttcgcttatatgaattatatggcgaggataacatggctatttatagcgtttatttaaaagtggagaaaatggccaaggctatggaggctatttcaggcttttcatggaatttgaggcaactaaaggagcaataaaaaaatgactagtgaatcagtaacttacttaaaaaatatcttagctgtccaaaatattagcggtcttattacttctgagggctatgacttaatcgatcaagaaaagttagtaactaatcacaatcaggctaagattttagctcgattggttaaagaggtaggtactaataattacaacgccggttacgctgaggggagagctgaacaagcgtttgaagacggtaaaaaaatggctgagtttatgaaaggagcgtcacaaggtgaatgacttagtaatcatgaaaagccagaaggctttgacaactagcttgaaagtagctgctacttttagtaaagagcataaaaatgtgcttcaaagtattagaaatctcactgctgaaaattcagcagtgaaaaagatgtttgctgaaagcacttatgttaatgatcgggggcaagaacagccaatgtactacatgaaccgtgacgggttcaccttgcttgcaatgggctttaccggcagggatgcaatgaagttcaagcttgaatacattgaagcctttaatcgaatggacgaattaattagaaatgaagacaacttaccgcaaacgccggaagagcaattacaactaactatggtggttgctaatcgccttgttaagagaatgggcaaggttgaagcccgtgttgaccatattgagaaaacaagtgaattaagtgaagttcaacgctaccagctgcttcaagcaagaaaaaagaaggtaattgaagccattggcggtgtaaatagcaattattacaaagaaactaaggctagaaaagtatttaatgcgtttggtagagatttcaaaaaagagtttcaaattccaaggtatgacagtttagaaaagcaatactttgaaaaagctatggaatttactcacaattggtatcctgattttgtccttcaacgtgaaattcaaaattccaacgcacaaactagcttaaaaatttgataagaggtgaattgatgttagacattgaagtaggagaaacaatcacagacggctttaaaacttatgtgatgggacatgacttaaatttgcattttgtcagttatggcaaccatgcaactcatcacgtaagcgaggatgctttaaaaatcattttgaaaacgcaggagtaaaggatgcaacgagttagaagggtgagacgggaaccaggtcccgaacataggattcaaaacgcaattattgccaccttaaattggcggcgatgcgctgtcattaggctaaatgctggtgctattcctacaaggaatggtcatcttttcaggggggttaagcctggaactcctgacttaatcgggtaccgtttaaaagataagcaagtattttttattgaagttaaggcgccaaaaggacgaattagtcaaatgcaacaaatgtaccatcttgatttaatgcataagcatgtaatccacggtatagctagatcggttgaggacgctgtaaagatcgtcaatgaaggcttaatcggctatggttatccagattacaaggaagtatgaagagaataggggaaacaatgtattttaaattaattatgctggtagttgctatatatgcttgtggcttaacagcttttagccttggtatagttctagcaagtaaaagaaaaacttggaatttaaagctagctcaatcatttggaattatctgttttggcgttattagcaacctatttattctatggatgccgcattgtaactggtttaatgcgtttcttggaatagtatttataatcttgccagttctagtatgttggtcaatattggtattagttccagactcacgggaagcctggtaatggcgtttttaaagattaaagaagcttgtgctgctaaaaatattactttaaaggatttatctaagttaagtggtattagtgagagatcacttgaatggtacgtcaagcaacaaagagagccttcgttaagtagggttgagaaattagcaaaagtattagaagtttcaccagcgtggctggtttcatgggagtgaagattgtgagtttagcaggtctgaattttgataaagaaaaaacaattagcaaggcaaagaattttcttgaaaatgattttccagacattatgaattattcaggtctgccggtaacttacttatctagtccacttctcgaccctacgggtgttcacggcggcggtaatgtaaaccatcagcccgatcaatttttaaaagctatcgagcaacaagacaagtacgatgcaattgttaaggactgtgaaaatgctacccgtgctgtggttgaagctatgagcagttgtcctgataccgaacgggatccgtaccgcaaaattttggttagaagatacgttaaaaacgattttgcacaatggatttataacgatatgaattattctccaagaacgtacggacgtaaaagggacgaagcactttatatattcgctcaacacctagagcggtaccgcaagaagtacaatgctgaaaggctaattcccgtgttgatggtgcatggatgacctatttttgaccaataaacgccaatttttgaccgataaatgaccaacttttgaccgaaaaacgccaatttttgacgcatttttgaccaacacttgaccattaaagcgggttatattagtagagtcgaaagattaggaaagagatctgatctttcgatgttgctcgttaatttaacttgttagtcaattattacgagtcattaataaactcttgtttttactataaatatgggttgtgcaaaaggtgcaaccctatctcctacaagcctagtgtaacggcaacacgccagtctccaaaactggttatgaaggttcgaatccttcggcttgtgtagtctgcgaagacgtgtaaatccaccgagcggtctgagcttattaaacattgttctagtcctgataagctcgaaggcaagtttgaagaggcttgccttttatgggcagataggtagtctgctcaccgttaagttgatacttgttattaatttagattcctcccagaatttaggtgagtagcataggttcaatacctgtggtgcccgttgagtaatctggtgcgtaaaataagcaacttatttcacaacacattcaattgaattggttacgaagtgcacccgtgttggttcgaatccaacattactcgttgtagtcagcgatgatgggctactagaatccaaaaaattcaggatcacgttaattgcagtagctgctaagctattgctttttgtttttagggggggaaattatgaacaaaattttaacttttgccgctggtgtggttatcggtgtagtttacaaggacaccattttacaagtagcaaagcaagtagaagccgcaaaggatgctaagtttgataagaaacttgaagacaagctggcaaagcactttaaagatgtaggcgaacaagccaaggaagaactagataagaaagttcctggtgcgtttgacccaagtaatctggatggcctgtactaatgacacctacacggtactttgagttatgtcaaagacatagccgtttagttaaggcaagaaaaattgttaagtactgcaaaactaatacagttgctaacatcaagcagaagattctatttaagcaagaaacgggctttatgccgcaagattacttagatagatttggtaagaaaagttaggaaatgaaaaataacgaagaagcacctatgacagattcactttttattagaattgctaaagggaaaattgcagattaccttttagaagttggattaaatgctgatctttcaaaaagtgaattaatggcaaaaatccagatgacttggtacagctatatagctcgtaattataaggctatgttctgtatccatgattttaagggcaaagatgaagcaaaactttctaatcgctattttgaagtaacttatattactaaagatgatgagtttgtagctgatgaatatttgcagtttgttccaacaacggtaaaggaagtttaagggaatgcaaaaatgaatagaaagaaagtaacttacgtggtaactaaagataagaacggtaaggttattagtattaaatctgttcctgttccatcattattagatagagtgcaacgctcgtgtgaagaacgtttctcatcgtttttgttagcagttattgttgtgttcatatgtttaatgacgattatgttagtgcttaaaagtttaggaggctaaatcatgcaagtagaagctaaatcaattgatgaaattaagccctatgaaaataacccacgtgacaacgatgacgcggttgacgctgtagcaaattcaattaaagaatttggctggcaacagcctatcgttgtggacaatgagggagtaattatagcaggccacacacgcttacgttgaaaagaaaattgctgaaaaattaggcttggttagtgtaagcacaaggtctaataatatcggtgggaaagaatactccactaaaatgtttttagtagacagggatgtttacgaaaaggctggttacaatcacggtaaaaagcttaatattaacggcaagttagttcaagataagtatgtattttcattttaaggggtattaaaaatgtttgatgaaaaagaattcgatttattgcaaaaggtttgtgaattaggtacaaaaggcttagaactatccgaacaaagtttaaagaagcaaattgatttagttggtgatgatcttaaaagatcagctaataaaagctatcttagttctgacgatttagaaaacgctgctagaagattaaatgatttagcttcgcagattaagcaattaaagttaatgcaaaaccaagcagggaactttgaagcttataagaagcaacagcttaaaaaaataagaaagaaaaaagaattgacaaattaagaaagttgtttattgaactggttagtaaatcagttcttttattttgcctaaaaaggtggtgatttcagtttggcaaaagctacaaaagataagggtggtagacccgaagtaataacagaacaaaaattaaatcagtttcaaacgtttattattgctggctgtagtcttaaagaagcttgtgaacaaattgaaatctctacaaatacgtggcgtcgatatatgaagagacatccaagttatgtcgctaagtttgctaggtggaaaaaggaacttgaagcacgggcaaaattgaatattgccatgaagatcactaacgaaaaagataccgaagcaagtgtttattaccttgaacgacagactaagttaagagatcaagcggcaagaaccagtttaaatcgtgctaaagcccaacaaactcgtttgcaaaacaagttgttaaagaaacaacttgaacagattgataccactgcaagtaaggcaagaaatagcatgagcaagttagacatggataccttaaagcgtttagcaaatttagaccaaggagttgatatcagtggaattgactaatgaacaaaggcaaggtatagcgttagcggctagggaagaactagcacgcagaagctacgcctattattttttattggctaattctgatattaacgccaagctttatgattacatcgagtatatttgtggcaagcttcaagaaataattgatggtaagcagaaacatttgatactggaacttccaccacaacacggaaaaagtatgtgtgtgactgagactttcgccagctattacctgatgaaataccctgaaaatcaggtaatggtaacgtcatatggtgaagacatgtatacaaggtttgcccgtaaggaaagacagcattttactgattgggctaaccgactattcggcttaaccatcggtaaaaatagttctaacgattttactgttgcgggacaccgtggcgaagcgtatttcacttcaattcaaggtggtggtactggacgaccagccgacttgctaatcattgatgaccctatcaaagacgcaaaagaggcacaatcgcctacagtaagggaaaatatttggcaagaatggacttcaacattttcaacccgtctatctgctaacgcttctattatcgtaattatgactaggtggagcaccgacgatttagctggcagactactagacaaaatggactttgactgggaagaaattaagtttcctgctattgcttatgatttaccaagcggtcaaactgatgctataggcagacataatggcgaagccttaaacccagaaaagcacccgattaagcaattgttaacccagaagagtaatttaggtactcaaaaatttaatgctatgtatcaacaagcgccaacggttcaagagggtaacattattaagcgtgaatggattaagttctatgtccctgatcgtgagacgatggtacggcttcacttaacggagaaagaagtcaagattctgccacgacacttgcagcagactatccaagcatgggatgcaacatttaaatctaaagaaaatgacgactacgtagcaggtcaaacatggtcaagacgtgatgcagaggtgtttttacgtccaggctggtgccacaagcggttaagctttacacaaacgctagacgctattaagtaccaatcaaccatttacccggaatcaacatcaaagttggttgaagacaaggcaaacggtcccgcaattcttgatactttgaagaagaaaataccgggaattatgccagtatcgccaggtgccgacagcaaagaagcacgttttgcttctgtgtcaccgtattttgaagcaggtcaggtatacataccgcaccctaaatggaaacccgaatcagaagaattgattgaggaatggtgtgggttccctaacatgccgcacgatgaccaagttgactctgctacttatgcaattaagtacctaatgagaaacaagcggaaaatatcactcggctttatttagaaaggaggtcattaattgtttggttttggcaaaaagaaaaagccagcacaaattacaattggcgctgactttatggattatgaaagtaaaggcgtaacacccagcagattcggtgatacgtcttcttttatttcaacaaggtatttagatagaaaatacaactataaacaagctgaccatctgtttaagtctaatgctttagctaaccgaatcgcccgtttaccagctgaaacagcaactcgaaacggctggcggatagtgattaataacaacgacgaaaaacaagtagtctatcaaacagctttagatgcattattgcctaaagaaaagattgctagtgaaattatttatagaaatatcattggagatgcgtatttaaacgtcaatgttgatgaaaaacaccgaactagcttagaacagccgttagacccgcacaacattttaaaagtcaattcaatcaatgcttttagtcaaatgcatgtcaaagctaaccagatttgtaacgatccaacgctagaaaactttggcaaagaagaaaaactggtacttgaaggcttgtccgatggctcagatgataattcaaaagagcctgaaagtatcacaattgacagtagccgctatagacacatttcgctggacaagatggaagacgatgcaacgggtacatctttgctaatgcggtgctacgaccagattaaaacccttgatactggtttgtactcaaccggtaagatgctttacgagtacaacatgaaagtttggaaaaacgacgcctattttgatctgtctgaggatgaccggcgcaaaactgatcacagaatgagtcgcggtatgagcaccgaatcgttggtagttgttggacatgacgacgacctagaaaaagtttcaaataagccgggcggcattgattcactatttagttttgcttggcaacaacttagtaccgcaactgggattcctaaatcgattttgatgggtgaacaggccggtacattggctggcgcttcacaggacgtagttaactactacgacagtatcagttctcttcaagagcaggtaatcaagccacaacttgaatggttggttaaattgctgatgtggtccgaaaatgtgggcggcggttcagaagatccggactcactagattggcacattgagttctatcctttgcggagactaactgacagtgaaaagatcgataatctcggtaagctttccacagcgttatccacagcaattaatggtggctttcttactactgatgaagcccacgatattttgcttcaacaaactactaacgaagcgattccaattcagttaactggcgatagtgccgatgatgacattaccgaccaagatagaaaatcttttgccaaagaaaaggctaagattgaaaaacatctcacaggagcaaaagaccatggcaagaagacgtaaaacaattccaaagacaagataccccatgaacttggaaaaatcgtatctgggggctttaaagcgtcttgtcttgtcatggaaaaaaacagcgcaatggtactccgattattatttgaagaattacatgttaggcggagcgttgtcgattgattcagatgatgatgaaaatgaccctcacaaaatagagcggttgtccgctttgattgcgttgatgatattggctataaagaattctaatagtaaacaggaacttgaaaatgttgcaactcaatttgtactgtcagtaaatagtttttcttatagcaatgtcaatgcgcaagctagggcaatttcatcacaagcaattgaaagcaatccgactattcaagcgtttatcaaagcaaagattaaggagaacaccgcttatatcacttcgatgcgggataagtacgttgcacaattgcaaagcgacatttaccgcgcaattagtgatggtaagggtgccacggaattaaccaacgcaattgttaagcgtacgaatatgtcatataaccatgctcggctaattgctaacgatcaaacaggcagtattttagccgagttgaataaataccgcgccacacatgcgggctttgaaaaatatctatggcaatccatggaggatggacgggttagacctaaacaccaaatactagatcaacaagtttttagatacgatgatccagatggcggtgacgatggacagcttccaggtgagccgattaattgccgttgtgttgcgatgccagtaatagatgattagcactcatgaagggtgctttttttatgcagaaaggagccagaaatatggcagataatacaccaacaagtacaccagcaggtagtacaagcaagcccttaacgggttcacttttaaatagtgctaccaagccggttattgataagccaaccagttcaccggttatgaagccggttgaaccagcaaaggaccctaaaggaatgtttgattggtctgacgctaagccttacgtgattggtaaagatgaaagtttgtttgatgtcgctcaaaagttctctgtagctttacagcaacttagatacttcaaccacatcaacaaagcaacgatgaaggttaaagaaggtcaaacaatttacattcctaacaaaccggttgaagttccttacggtgcatagcttatgggcgcaattaggtatgaaactactacgccaatcgataaatttactatcgatccaataacggggtttctgcacgtcaagaatgtgccaatcacatgtgagggcgtacgaccataccgtcaattcgatgggcaacgaattcaagaagctaagacaccagaggaattgttctcagctgctacggttgattcagccaataacaaaccagttactgacgaccacccaaccgacgcaaacggcaacacaatcatggttaactgtgataattcccagcgatttatgaagggctttatgtccgatcatgcccgtgttgataaagcaaccaagactatcagaaatgatttgaccataactgatagtgacttaatcaacaaaatcaggcacggcaagcaagaattatcaattggttttcaaatgcagcttgatccaactaaaggtgaacttaatgggcaagcctacgatgctaagcaaaccaatatcagaattaatcatgttgcgattgtagaccgtggtcgcgctggtcactcggtaaggctaacggctgatagtgcagaagaaattcctgaagataacgaaaaaaagaaaggtgaaaagatggactttacaaaagtacataccaagcaaggtgatattagcgttgctgttgaagatgccgacaagttaacgaagcttgttggtgacgctgacgacagcaacagcaaattagaaaagcttattgcggagcgtgacaaacttaattcccaaattaaggagttacaaggctctggcgataagaacaaaaaggaagccgccgacgctaagaagaaggctgatgaagctaactcacgcgccgacagcgcagaagaagaaaataagaaactcaagtcacaacttgcaggggatgcattcgaagacagaatcaacaagaccttagcattccgtgaaagagctaagaaagttgttggtgacagctatgactttgccggtaagagcgaacgtgaagtcgaagaagccgctcttaataaaaatttaggcgaacacgattattcagataaaagtgacgactttgtaagtggtctttatgaaggcctatttagtactaatgctggtggcgtaagttatggccgtactgctggcgattcgaacgaaaagactgccgtagagaaagcacttgaagcacgtcaaaacttatacgaaggaggtaacgaataatgccattaccagttggacaactttatcaaaagaaagaattaggtaacggaactatcggttctttaaaagattattcaatttataccgttaccgctgctactaatatcgattatggtgttgcccttgatattcaagacaatcaagccgtagtagcaactaaggcacctatctatgcaatttcggttaagcgcgcttacgtaattggtcatagttacgatgacatcgaaaatgaccactggcttaaaggtgaaaagattggcgctttacgccgtggtagcgtgtcagttccaattactgaagacgttgaccgcttagatcaagcaactattaatgctgatggtacttttagaccagctaagccaggtgagcccgttgttggtcgctttatcactgcaggcgatgctaatggtaccgcaatcgtagatgtcaacttaactgacatgggtactactggcacaggcgccacggtagacaagccatcaacaccaacaactgatccaagtactactaatcaatcagccggcacatcatcaactaccggtaccgataagaagggggataaataatgccaaaagcaggatttaatacgggaactgcctatagtgaacttttcaacgttgttgatccggttgttttacaaccaaaacgagaagaacttcaaggcagaacaatgttccagctaaaaccgcttcccgatccatgggcacttgcttacgaatgggcatggaaagaaattatgggccaagcatcagactacaccgaccgtgcaacagacatcactaccactgatgtaacttaccacagggaagtaggctatgttgcagagaaggcagctggattcgaatattcacaagctgatttagagcgttcacacaccggcggtagaaatatcgatattattaccgaccgtgcaaccgctactcatgacgcgttagcaaactgggaggacgctttaattttcaacggtaacggcgattcacaaagacctatctacggtttaactactgatgctgagaccgcaggttatcaagctttagatgatccaagcgtaaccttgcaaaaggtagtagaccctaacaacaaggacgcatttagtgatgcttacaagattatcaattacttcatggatgccgcttcaaagattactttgttgcctggctaccacaacgttaagccttacttagctttgccaccaaaggagtacgaattattaacccgtccgttggttaaccaatacaatccagacaagactttatggaacatgatccaacgtaacggagctaacagcgatggtgtatttgctggaattaaacctgttaccgagcttgaagctaagtattggaacaatgaaaagggacaagcaggtaaaaagaatatgggtattgtttaccttgatactcctgatgttgcacaaattgttattgcaatggaaccacgccgttacggcacagccattccatccgctgacaacggattaagctacaaacaaatgtacatggaacgttcaggcggcttgtcagttaagttcccagccgcaattgttcagttaaccggcttgaatgatggttctgaaacatgggcagaagctaagacaaaggctaagtagtatgaatgacacaactaccacagtagggctgattaaaaagcttgatactgcaggtatgaccgatgacgtacccgatgaatcactagaagcgttgattgaaaacgcccgaatgattgctatttctgacgggtttcctaaagtaaaaaagcttcatggtgcggaaatgccagcccttgagttggctacccgtgccatgacactacaccttttagcaacgcaagacggggcaggtagcggaatgactttcgaaaaagtcgatgttttggaaaaccactatgctgataccagccgcttgaagtggttacaacgctctccatggggacagctctattggaggctgtaccaagattatgtcggcaatcccgtaaaaattagaataatcgaacactgatgaaaattgaaggttataaccgtattccagaagtaactaaggaacttgactacttaaaaacgcatcaggttgtaattggtttttttggaaaacgtgaaagtagattactaacaatcgttggggctaacgaatttggagccacaatcaagcctaaaaatggcgagtggctatggattcctactaaagactgtcctaaaggaaaaggcccgaaagatattgaaggcttgtttattcctaaagggcaccgagtagcatgcgttaacgatcacggcaagttagtggcatatttctatcttagtaagcttgttcaaataccagcccgcccgtttattcggcaggcttatttagctaacaaaaggaagtacacacaattagtgcggagatatattgcaaaagttctagcaggtgaagcaacgggtaagcagctacttagccggctaggcgttgcatgtactgccgacatcgctatgtcatcaattaagttgaagcacccaaagaaccgaccagcgactatcgagcgtaaaggctcagacaatccgttggtcgatacgggtgagcttcaaagacaagtaaagttcatgatagtttcgatttagaaaggggggtttgatctaatgcacaaaatgaatccggcaagaatgattcacaagtacggtgtagacattaaagtttggagttcggggcaattctataaaccccgctatcgtggcgcacctactgatgcccctgattattcccaattaagcgatgatgatgctgaaaagcttcatgagccagttttaccaatgtcaagtcaccttgcacaactcttcgcccagttagacggcggcggagaagtgcaaggcgatttactttggttatcaattaataaatatccaattgaaagtgtggtcaatgttccgacacaaggcggctactacaaagttactagtcgatcatcttatgaaggttatacgaatccacacttttttgagtaccaattgaagggagtaaatcaggatgacacaaacccaaatgccaccaatgatggacaactacctagtgatataccaacttatccaggtagttaatcaaaaatatcattgcggtgtatatccgcaaatgaatgccggtttgcgtagcaattacccgtttattacttatgactgggtagaccctggaagtgacgttactttagacgaaactgatgtcatggaagtaagacttcaaattgatgtgcaagcaaccgacatgtatgaagctttgaatacggccaatgatttacgcaagacattagcgcacagttacggatatagaggattttttaaacaagcacatgtgattccacataacgtatcaggaacaagctctcgaaatttctataatggcacgcaattacccgtttatagatttggtttcgattgctcgttttctatttaccgtgctggaactatctataaaccggaagaccttaactttgaatttaatgaaacaacgattgaatcaattaaggctatgaatcaaatgacaggaaaagaaataaacgtaagaaaggaagaactttaatgccaacattaaccacggtcgccccttacgaccgccctatggatgtgaacgtcattatgactgtcctacatccccaaccaattaaggggctaggtaatattttgctgttaaatgctactactgcagctgctaacggtgattcagctggcaaagacgacaagggcgcacaaaagacaccagctcaaactttgccagatactttgtcaaacaccgaccgcttgaatggtttgcttttacgtaagactgacccagctactggggcaatttaccgtgaatataagaaccttgatgcggtggcagttgactacaaagaagattcggctgtttacaaaaaggctacagcctactttgctcagccaaagcactcagaccgcttagccgtcttagattatgacaagtcaaaggcttacgatagtttgaaggctttctggtacttcaactggacttttggcgtatgtgtagacaacacaattgacgattcaaccgttcaattgtcaaacatctttgaagtaaacaaagatcacttcttagttctccaaactgaagatttgtccaagtttacccaaatgatggggcaaaactacactatcggcttgaagcacgatttgaatgagccaatggacgccgcttttgtcggtggcattgctcttaacgatgttggctcaattacttggaagtttaagcaacttgaaggcattacgcctgaaaacttaactagtcaagaattggctggtattaacaatattcatgctattgcctatgaagaaatgatgggcaaaggtcaaacctcagagggaactaccttatcaggtgaatatattgacttgcttcacggtgtgatgtgggttcaaaccgaatgtcaaagccgcttgcagaagcttttgcaagataacggcaagattccatatgaagctcaaggcattgccatgattcgtgcagtcttaacacaagttttgaatgaagcgtacgacaagggcatcatcatgactgacgacactactggtcgcccaatgttcagcgttactaccactccacgtagtcagcaatcacgccaacacttgtcagacagattctatgacggcgctagctttgaataccatgcttcaagcgctattcatactattaccgttaatggcgttgtcgattcagacactatcatggctgcttaattagaaaggggagtttaaatgccttcaaagattaaaacatctaaaatgcgtgaatatgatgccaatgactgcaccattatgatcaatgacaaattgatgtatggattttcagaaaacagcatgtttacggttactgataaaactgatgcaaatacgtacaagattgatccacaaggatcagctactaaatcgcacaataacaagactatggcgggctttacattgccattagatgaaacatctccttgcaatgcctatcttttagacttgtttaacaaggatgaatttttcacagttgacatcattgacacaacatcacacatttcttgtcattatgcatcaattgacaagattccagataagcaaggcggcgcacaagctggtgaccgtaattggcctattacaatgcttaacaaggaagaaacttcgaacatgacctatagcgattaattcgaaggtttcaagagactttcatgaaatcaaattaacttaaaggagacttaataatgagtgaagaaatcaataacgcaaagcttgccgaaaaggcgcacgaagaacaaatgaagattaaggaagaagcggaatcaagcaaggtcacacctttgactgctctttctaaaaccgtaaccattcgtgaagatactgatcaagaatatcaattaaagcttcaattccctggagttgaagaagcaactgaaattctggaaaattcccgtaacccgtttggcgcaattaatcgtccggaattgctgagagaaagcttgaagcacgtgattatccaaccaaagattaagtcaattaagtggtggaacgatcatgaaggtctttatgaagccgccgaagctgttttgaattttcttactgaaaaactctagacagaaactaggtaatagagaaattgaaagacaagccgattatgttgaactccctctgcgtttgataatgcacgggattcctgaacggcttgtaaaaaatgctacaccagatcaattattgattatggcaaaggtagtagaacgggacatagaaacaacaagtattagtcaagcaaatcatatcggtgaattgtttggcggtggtgataaatagaggtgatgcctgtcaattaaattgatgggtttttattttgcctgaattttaaagaaaggagctgaaaacgtggctgatatcgaacatctaggaattggaattaatacaaacgttgaatacaattcgctaaaagaagcagagcaaacaactagaaagtttatttccgacctcggtgttttagaaaaacgctttgatcgtttaaaggctcctgactttaccgaacaattcaacagaaacagaaattccgttgaagagacaagtcgtacagttgctggcttaaaaaagcaactaggcggcatggcaaccactagtggtcaaaccaccagcgaagtcaaaaagcatttagaagaaacaaaaacttcaactgatcgattaattgatgcaaacgtaaaattaaagtcttcaattgctggtgtcggtgattccgctaaaacaatgggcggtttatccaacacaatctggaaagctggcgattctgctaagactgcttcaaatggctttaatacggcaaaagatgccactgaaaagactaacgaagcactaaaaaacaacagaactgctagtgataacgcaacaaaaggctttaatttgcttcatgatgcgggttcaaaattaattacctttggaacaggcattgcggcggcaatggttccagttgcagcggcttttaagaatgcaaatgatgaagccactaagctagctgacgaatacaacgttattaagaacctgcagcaaactggtggagatagtgccgctactgctaagaaaaatacggcggctattagacgtgaaaatgctgatttatctacaaaatatggcgttgatcaaactgagttggcaaaggggtcagaagagctaattaggcgtggttattccggaaaacaagatttagccgcacacaagtatttcgtacaagctgctaaagcgactaatgagcattatgatcaaattgttaatgccgccgctcctatgcttgaacagtttggctataaaaagcgagctggtaacagtactaagaagatggcacgttacacacgggaagttttaaacaaagcggcttatgtcggtgacatgacatctggtaaagttggtggtgaaaacggatttggtaattcttttaaaatgtccggttcaattcttcaccaaacaggtcaatcactttcgtcatcattggctgtacttggtactttgtcaaacttcggtgaagaaggcacctctgctggtactggtgtaaggcaaattgtctcaagtttaattggtgcttcgaagagcaagacaaagaccgcggcactaaaagatttagggttatcgcccgctgatttctttactaaatcaggcaatttaaagcagttgcctgccgtctttgatattcttaaccgagctacgcagggcaaaaagtctaaccgtgttactggcgacttcaaacagttattcggtcaaactggctttaacgacgcattaattttaactaaaaataatcgtgatattgctaataacgttaaggatgctaacagagctgatagtacaaattacattactaacttatctaataaaaatatgaagtcactaaaaaaccaaatggaagtgacacgacagcttttaaagcaagttggaatgcaatttgcccaacaaatagcacccggtttagctaatatgcttagattagttaacaaggtcttgcaagccattaaaggatggcctgcacctgttaaaaagaccttaggttatatcaccgctattactggggcgttaagtactggatttgttgctaaaaaattagttggcaatgtgcttggtattggtggtaaaactgtagccaaaacggcggcaaagggtgccggtgaatctgctagcccgtcccttttaggtggaacgggttcacttataggcaaagttagctccaacttaattggcggtaaatttgcgaaaactggattaggtcaaaaaactgctggtcttttaggcggtacagcaagcaagggggcttctgccctagcgattggcggtattgcccttaattctggtattgatctttacaaggcaatcaccacaaagaatcctaaaaagaagtttgaaaactatggtaaatctataggttctgcaatcggcggcggcgttggtctttatctcggcggtcccgctggtgcggctatcgggtctactttagggcaagtagccggcaaatgggctggcgacatggcacgcagatttagcaaaactaagtttggcaaatccgttggtaaaaccttcaagcaagccgtgtggtcaattaaaacaacttggcacgatgctggtatgggcaaaatgattggtggcactgttaaaagtgtcaaaagatcatttagcagtatgactcgtgatattgggcgagattggcgcgaccttaaccggaataaagattttaggaatttcaagaacttcttaaagtcaggattgatggcttctttaaagcttgctattaaacaaggcgcaacagtcattaaaactggtattggcattgttcgcggagctgtcaaaattgtaacgtccaatattaaaggcattgtccaaatatcatcagggactgtcagaacaatatctgatattttccacggaaaatggggcaacgcttggaaggacatgaagggcgttgcaaagtcagctattgacatggttactggaaggctatccggtcttaaagacatgtttagctcagttattggcggtattgcaagtagtgtcaaaaatgtttgggattttgtatcaggtaaagactggaagacaaagaagcctgaaaatagcaccagtgttgcaagtgctaacaaatccgttaaagctatgcaaaacggacaaggtggtaaacatcacgccagcaagtcacatgctactactattgctgacattaaccgctcgactcacttaggcgctcatgctaacggtactgcttcattagttggtgaagcggggcccgaattagcttacaagccttattccaaccatgctcgtttgcttggcgctaaaggtccgcaattggcaaatatccagtcaggtgaaaaaattctcaacgctcgcgacaccgcaaaggttatgagtggcggtctcggtgctggattaaagctcaagggatatgctaacggcaacgctagccttggtaaaactaccaagaaagttactgatgactacaagcagattgcttctaagtcgtccaagtcacttaatgatcttactaagaagagcaattcaagctggcgcaagattacaagcactaccacaaaacaagcccagaagagccgaaaaggggcaatagacgaatacacccacatgcggacaggagttcataagcaaatggacaagatgcatgacggtgtagttgatcttgcttctacgactgcaaagggctttggtaaagagctaggtcacatgaccaagtacgctcattctgcaatgggcgacacaattgaccaggttaattctggtattaagggaattgatcaagttcttggacagtttggtggtaacacgtcagtcatcaagccagttaagttcgctaaaggttcaaatgggcgtttgtcccaaaacaccatggcaatggtcaatgatgcgacaattggaccaagacaggaagcaattatcaaaaatagcggtgatatttggattccaagagggaataacaggatattgccacttgaaaaaggtgattctgtcctcaatggttctcaaacacaagaattggcaaattattggggattacagcgttttgcgaaaggctctggcgtaagtcatagcagactaagaaaaatcgctgagacagctggaaataatcctgctaagagttttgctgatatgtacacttcaaaaattaaggcaagtggtacagatttacgacaaggctctattaatttagctagaaattcatcaactaagttaggtaatccatggtctaacgcaatgtgggccgtcattaacaacgcaattggcggagctaatggcaagggcggaacccgtgaaggatttttaaagtacgctgaatcaacattcagtggcgttaagtaccaaatgggcgcggcaagcaagacgctatccgactgttcgggtatggtcatgcaagctttacgtcactttggcgtagatattggacgcacgactgtggcaatgcaacacagctcaggtgttgaatacctaggtaagtcgttatctaagacaattccaggtgacttggttatctttggccatggaacaggtgccgctggtcacgtgggaattatcaaaaacccacacaccggaacaatgttcaatgaaactccgcctcatgctcgtgtcacttcgattgctgacgacaaggggatgggctacggctattaccgtgttcgtggcttacacaacgccagtcaagccaagaaaacagcaacagcagataaaaacttgatggctcttgcaaagaaagaattaggtaatactgctttgagttggatcaagaaaaatcttagtgatgatcttggttcattaggctcatttagtgttggcggtgacttagctgaaagagctaaagccctagccggtggattgaagcaacttgaccccaaagcaaccaagaatggtattgcagccgttttgggtaactggaattttgaatcaggtggtttaaaccccggtgcagttaacagcagcggtggtgcttccggtttaggtcaatggcttggcggtcgtaagtctaacttaattgcttatgctagacatcacgggacaagctggaaaaacgccggcacacaattaagctttgccgttaaaggcgaaggctcagacagcgctattcttcgctccgttttggaaggaactggtagcgttgccagcctagcaaacaagttttcatctgaatgggaacgtggcggctacaacgctcaacacgtcaaaggtgccatggagatccgcaaagttcttggatacgctaaaggcggcgatcctgtcgttggcgacaaggttttagttggcgaacacggtccagagcttgccgaatttaaagattcggttcacatctactcaaatgaaaagacgcggcaaagattaaagccactaacttcatctaagccaaaagtacgcccagtaagaggaactggcggggctttaggtggcattcaagtaaccgtaaatattaacggcaacgttgatggcgatgatgctaaattgcaaaaattagcgaagatgataggcgtagaggtagatcaacaagtacgccaaaagttaaatattattcttgatcatattggcgatgatacgggtgatgatgacgatttcttatagaaatgaaggtgatgctaatggttcaagcaactaagccaaaaaagagaacagctgaacaaaaagcccatgactctatgaaatactgggacaagcggcaaaaacatgaaagcgccgtttaccgaaaaatgttttcaaaggcgcagggctatgatttcgattcacattttgaaaagaatcaaattaaaaagaaaaagcttatccgaaaacgtgataattgtttgaagcttgttgatgccgcaaataaaaggaaaaaacaagcagaaaacaattataaaaaagcaaaagacaagtacgaccgtatagttacgcaaagaattgatttaagtaacaaactggcggagattgcggaacacaacacgggttggaaaaatgaaggtaagtgtgctatttaccgttcagacggtaaaggcgaaattatttacatttcgccagcggatggtgaaagtgaaagtgtttcttcaaacattacttcttatccggttgatgaaggggcgccatatagctcatatgctcgggtaaatagtaagggcgcaacagttgcaggtattattgttggtaaagataaagctgattcgtaccgcaaatggcacatgcttagtcaatggaatagttcgcatgttcggttaacatatcgaggggacttctgctacaagcactacctaattgcaaacatgaacaacgactataagaatcttcgagataacattgaagtttcacttacttttcagtttgtctatcaagcaaaaatcaccacttcaaacgatagtaagcatcacagaaaatcatccaaggcttcgaaatccgttgcgggtaacagaactaagaaatataccgctattactattaaatctggtgatacattgtgggctttgtctaagaaatatggcagttcggttcaatggatggcacgagtcaaccacattaagaatcctaacttaatctaccctggcaataaaatacgggttgcgtaggcggtgatttagatgagaaattatcttgatgttgatgttaaaaatattccttatatctttcaaataacccttgtgggcgatacctatgatatgagagtagattacaacgaagttgcggattactacacaattacaatttggcataacaataagaggcttctaacgcaggagcctcttttgcttggtcaattagttggtattgatattcctgatccagaattgccacgaattgacattcgaaccatggacgaaacgggtaaggcaacagaccaaggcaagggaacatttggatatgaggtccgcttgtatcttgatgttgttgacccgaatggatcagaaacagaagacccatcaattaaaccgctaggttatgatcctaacgaaaatgatgacgacctaacggatgaggaggtgtcttactaatgatcgttactaaagatccacatatggaatttgtggcggttgatagtaaaggacacaagcaaatcgtatataacgatgaaacttacgaacataattatccttttacgtttgaagtcccgtttactaatgatcctgtcccgtctacttttacaacaactattttcaatttaaccaagcaacataaagacttttataaaaaagggatgcactgctggataaattttaactggggtaaagaccctaaaaaaatagctgaaggatttatctctaatacgggtaaattaagcaatgatgggacaactgatagtaaagttttaacttttactgaaggcacaaattacagtaatgtggctgcccgaaagttgaagctaaaaaagaataaaaaggttaatcactacaaaaccgtcaagatcactgaaaaaggtcattacaagaatcagcgctatagtacctcagttgttgagacctataagagaggtccaaaaaaagggcaaaaacacgtggttcaccattgggcttatcgaaaagtatgggttaagcccaaaaccgtaaacaaaagggttaaaagtcgtgataataagacttactttgctaatcgagtttatcgaaaaggtacgacttataagcaagtaatcgagggaatagcggaacaagctggtattaaaatagccaaaattgatttagcaaaaaatgaaggaataaaaaaatcctttaccgctaaaggaaagccgctaaccttgattaaaaaccttgttaagttggctgagtcagagatgttttatgaacgtggcaagcttgtaattgttaaccctaatagcaagaaaaatacttggtttgtgattgatgataaagacttaattcaagttccatcacaaaacgatgatgataaaaacgggacaacttggcaaattattacgcccttagtcccagaagttaccgttaataccggtattatcatgaattctaagttcttaaaaggaaaatttgtcgttaaaaatggacagcatagttttgatggcgaaagtccacaaactcaatgcaccattgcggcagttacaaaagctaaggctggtcataaaacaaaatctaaaagtaaaggcaagaaaaaaggtaaatctaaaaaataaggagatgacagtatgaaacaaaaaaatagggttccaattcgatggtatgaaaacattagtaaggtgaaaaaccgattcagcagaagtcttgaatctgcttttttagctaaagttttaacttacgacaagaaaaaacacattgcagatattcaaccgctggcgaattggatcgatggcactaaatcggctcagtacttagatgttccggttgccgaatcttgctataggcttgatgaattgttagataagtttaagtcggattttaaagccgttgatagtagcccagaagttaactcacattttttagaacattatccgaaaaagaagtctatgagagttggcgctgtagtgatagccgttactatggaccgtgacattgataactgggacggtacggggaacacctttacgccaaataccagtagaatgcatgatgcaaacgactcaattatcgtttctgtttataagggtgacgacgatggctagagatttatttatgagtgataatcatgatctagtcattgatccgattactcacgatttagaaatgactagcggtcttgacgaaatagctcaaagaattaaagcaacgctagaaattcggtatggtgaaatgcaacggctagaccccgaaatgggggcagactatagcagctttttaggtaaaaacttcaataaacaagcggcggagaatgatatgcgagcggctattgaagcaaatgttccggaagttgaaaccgttgataatatcgaatttatcaagaagcctgaaagaaaaatgcagattaattttagagccaccgcaaatattggtgaagtagaggggggggttacaagttgacaactgattttggtttaaaagaaacaggctatattgccccaagtttcgcagaaatcttagacggtgtggaagacgattttcgaacgcggcttggagatgacattgcgttaacaagtaatgcctatctaggtatttttgcccgtttaatgagtgatgctgcttacgatttaattcagcaacaggaacaaatttactattctggattctattcaaccgctataaattcagcattagaccgattagcgggcaatatcagtttgacccgtaaagttgacgctccatctcatgcggaagttgtgataacgaccgaaggcgagtatttaattcaggctggcgaaaagttcgaaacagaagatggcttggtgtttgatttaaccgaggatgtcatcacttcaaagcaagatgatggtacttttcaaggaactggaaacgttgaatgtgaagaaactggcgaatttactaatgtaccagctaacacaattactttgtttgccaacccagatgaagactttatctctgtaaccaacccacagcctgcaggcggcgggcaagattatgaagacgatgaaacctttagaaaacgtttaattatggaaaatgtcgcccgtcctggtcctacagaactaggtattaaatcggcattaatgaacctcaacggcgttaagcaagttggctttattgacaacgacaagtataagacggatgaatacggtaatcccgaatgttcagttcacatttatgttttaggtggtaacgatgatgaaatcgctaaaactttagttgataaatgtgcggccggtatcaccttagctggctcaattgttaaagaagcaccagatgcaacaggaaaggttaaagaagttaaatttaaccacgctcaacaacataacatttacgtaaaggtcgatgtttcaattaatgacgactggaacagtgatgcgggggttgatgacatcaagcaagctatttgcgacgaaattaattcccttgaaatggggcaaagggtcaattttacccgtctttattctgttacctatgacgttaacggtgttgatgatgcaaccattgtaattggtagtactaaagataaattagcagaccaaaatattttaattggtcgttccgaatttgctcattgtgaccctgaaaatgtggaggttgatttaattggcttatgagacaacagatcagctgatcgcggaagtagccgaccactggaacaagaaaaaagataccgttttttaccagctgctagacagttataattcactgcttgaaaagatcagtgatgaaaacgaaaaaattgcagactggcgaagcattgacaaggcaaaaggcacaacacttgatttaatcgggcaagattacaaagcttatagaattagtgatgatgatgaaacattccgtttcatcatttttttacacattttaatttctagggctcaaggcacaataccatcaatggttaaaattctgggaactgccctagatgcaaagccggaacaatttaaagtctataaaaccggccttcgtcatgttggtatcgaaataccgtgggacaatgtgcaaacacttcaaatgcaaaaatttatcataaagaacattcaaaatctattggcaatgggttactggattgatgagattgttttttatgtaaatgttacaactaccgagtacattggtgccgcttcaattgatgaaacggatttaaacattgatgttggttccagctggtggactggctgggaagagtcgcaacagaacacagaatatattgctaccgctgtaacagcggaagacgtaaatatgcatcaggtaacaactacgtggtggacaggttggcaagaccaacaaccatgtgaatcttacattggtgcaaaaccattggttatcgtttcttacaaaatgatagctaattagaaaggaaactatggatacaacgactagtaaaaaaatgaatcaggcgctagttacagatatagggcgtaatttgttttcaaaactcggatcgggtaaaggcgaaatcctttataccaaagccgcactttatacgcaagatttaagcggaatgaccgatgaacaaattagggctttgacctctttagctggcgaaaagatgacaaccggcattaaggtggctgacatctcaccggttgataaagaaactaaacaagtagacatcgaatttgcattttcaaatcacgatttaaatgaggatatcaattttaagtcgattgggctttacgcaaccattgatggcggcaaagaagaaattttagtcgcaattattccagctattggtactgcaacacttggagcaggttcgccagatcacacatcaacacagctaatcaagcttggcgttgcgtttaaactcggcgcagctgccaaaattaacatcagtgtaaagcaaattggcgtagtttatgatgaagatttagacgcagctattttgaagcttaaagcggagtatgacccaaaaattgcagaagcgggcaaggttaagggtgcaaagatcaacgacggagcggttgttgaacccgacaaggacggcattcttgacttgatcgttgacagtgaccgcattaaggattttccggcagatttaaaagacctcaatgacctgccaagcgggacatatcggacttccaaaagtgctgctagctttgccaattaccctaaaatgcaagatggaactaatatcccaatagtctggaaatgcgcactaatcaaagtagtcaaggatgctaatgttggataccagcttatagtgtccagccaacaaaaatatgcaatccgctattttagtaataatcattggggatattggtttcagcttccgacattatctaataatgacatcatcaaattaattgactccaaggttgacggactaaacatcggcaattacgccactaagacggacttaactagtgtttctaactcagcagtcaaaaaggttaatggcttaacccctgacggaagcggcaacgtaaacgttacctcaaccgttgcccgcggctttgatgctaatgctaatgtcgcaaccaaagaaactgttgaaaatctgcatggtggcaatcaaattttgctggatcagaatgcagggcaagacatcgttaactggaccaagggacagtttatcggcaagttgtcaacgtccggcggagacatggctgaacacagcactatcaactggaacggtgcgggtgacgttaactcacacgatggcaatattggtggtttaagctgggctcgggctactgatcaagctcagatctttgcggaaaacaacggcaatgacaacttagacctcgttttcaaactcggtgatgacgattctaaccatttcagttttagaaacgccgcaggacaagagaaagccgctattttagcaaacggtcaaatcaacagtccgactattcgggatttatacaacaagcttgctcagtacaccgttgactataacaacagctatatccatgacaccacaattgactttaacaactacctgcatgaaacgcgaacaattaaagttgctaacgtcaagggaaataatggtcccttagcaaatactgcgactatgtggggctggcttactacctaccactgggatgataactcggttacacaagaatatcggagtgctgacggtgacgtattctggcgtgcaactaatgcaagtgcttcaagacaatggacttggcacaagtacgctaatcaagataccgttgatcaacaacagaaacaaattaacgatttgatcaataccgtcaactttatcaagaacaactacttgctaggcaagcgattcccagcgaaccaagaagcacaagcccaagcttgggaaaacgcaaaccctaacggtattgcaatgattgaaaaataatagaagggagcgagaacatgctagatcatatgctttttaatagattaaaatggttcaacattgacaacaattctcagcagatcacagcaaacggtaagaaatggggagcttatccaactagcgtgaaattgaatggaacaggagcgcttgccagtgacttaggcttgggcaacgttatcggaaccccgaattgtgaatgttatgccaaaattgctaatagatttggaacttactacgtcgtgaattacgaaggacgaatggcgttcatcaaagacgaccaaattgcatctgaaaattgggaggggggtaaatccctcttaattcacttttatcaagcacttagagccatcactagaaaggtggtggttctatgatcgaaagcatactctttaatagtgaaaagtaccgtaaatacggctacaccagcattactaagacactaaataatcctgatcatcgattcaagttagttgatagcgttgatgttttagatatgaacagatacactgtggtgacttttagcaatggcgatagttaccgggctaagaactacgttctatataatcatgtagacgagccatcaacgttttttaatccaacaacgcaaggcaattatttgcaagtggactgcgaagccacagctcctggaaaagatcctgttatagaagcttattaccatggagcttatgaagataatgatcacgttatgcaggaaaccccaataacggttgattgggtaaaaatagaaataaacgtagattagcactcaaacgagtgctttttttatgcaaaaaataaccttgctcacggggcgttcccgtgggctttttatatagaaaggagccaataaaatggctgatgaaaatacacaagttgcaccagtagcgggcgccgaaacaaacgctacacaagatcaaaacagtgttgctgaacaagaacaggctttaaaggcaaagttcccaacccttacaggctttgtctacttgtcagatcctgacaatgcggatcctgtttggcatcacaaagtaatcccagtttttggcgatgaagcaagtgtggcgctcccatggcaagtccacgctgaaagaccatctgacagctttaaagacccagtttggacagtgggcgccactgattggagcgagaacgacaagaacaatcaagccgttatcttgcaagaaactacacaaaagctggctgaattggacaagaagagtgctgaactcgacaaagccaacgataaggtagaccaagcattaagagatatgcaagaagttcaagctcaatcatctaagcaaaacttagctttgatgaagagctttactgaacaaactcaaaacactaatcaaattcttggtgctatgcaaaagaccttagcaatggtaaccaaggcagttggcgcaaatgctaataacgctacaccagctaacccaacaactgatactaagccagcagaccaagcaactgataagcaatagttaaggaggacataaatcatgactttaatggaacaaattcaagcaaactttttagagatgtatcgtatggactgggaattcggcatctatgacaagaacggtatgaaggacctagtagtacaaggtttcttatcagctgaaaattaccaaaagattgtaggcgaagcttatgcgccaactactgcaacgcctcaacaataactcactttacgtgatcattagtctgctgattttcggtaaaggtttgggcttttaccttaaccgcagatttttcttttatccaccacaactagcgtggatgatgaacaacgtttacttagattgttcaatgatgattgtaggcattgcgttgctggtttacacctgttcacggtacaacaacaataagcttctaggggtgttgttggcacttgtcgtggtgctgctagcaataatttcatcaatcgaaattgaacacgtgatttttgcccatgaaatggagtttgtccagaacgctttgtcaaatacggcggttatagcctttattatctggacagcaaggcattattcaaagcgttaggggtgatatagtgcatgtcgacctaaacagcattatatcggctttgtccgctttgcttttaggctactttacctttaagcaaaacggtaagaaaagtgatatggatagcgtggagaataaccgagattacattgttgaacagaataagcgtttaaacgcggaaaacaaaaaactactcaatgaaaatgaaaaactcagaaaggagttaagtgaaaatgaagccaaacactagaattttagattacgttaccttggtacaagacggcgttttgaccgttgacgatgcaccacaagacatcaaggcagaggttactaagtgggttcgctactttgcaggaattaaggatgattcaatggttaaggatcctaaaagcactacaccagcaccgcaaccagaaaagaagcccgatactacttcttttttaactaagaaggtgactgactaatgaatttaagccaacttaatgaatatctttttgtgggatttcttgcctttgtcgctgtatgtcaaggtgtttctactggtattgatttctttgcgtctaagtcaaagaagcctttaccaaaggaagttatgaccattgaccagattgccaagttcgtagtaagtgaagccgctacgctcgacatttcaggtgctgaaaagaaagctaaggcggttgaagctttgctgaaccaagcacaaaaggaaaacaagccccttaccgaatccgtagctaagggagctgtccaacacgcatatgaccaaatgcaagctgatcaagaaaaggctacacaagatgaagatgacaatgctcaaccaattggttttgtaagcggtgatgattctgatgacaaagactagatataagacgtacaacgagtacgtttttgaatcttttggaaaatcgtttgaaaaccaaacgattgccaaaagaaaccaaatgaaaggcggtgaaaaagatgtcaaacttaaccgtatcaaaaagaagtttgggtgctgatgtcgcaagctaccaatcagaaaacgtaagctacgccggcattaaatttgcattgattaagcttacacagggcactggctatatcaacccaaaggcaaaagctcaaatcaagagttcacttgctcatgggcttttaaccggcggctacttttatgctacacactctggctctgtattaaaagcacgggcagaagctaagtacgctgttgaaaaggcgaaggcctacggcatccctcttggttcgtatcttgcggacgactgggagcagggcagtggcaacgacgtcaacggcgctgttggttcaaacactgatgctgtcatagcagctatgcaagtgatcaaagaagcaggatataagccgctagtatatgctggtgcttatgtattgcgtaaccgtctcaacacagctcgaattgtaaagtcattcggaacttgtttatgggtagcttcatataaagtcatgggtcgtcaagattccgctgactttaattacttcccatcaatggacggcgtagcaatctggcagtttaccgataactataaaggttacaacgttgacggtaacatttccttgattgatttaaaggctagttcaggtagttctcaatcgaaatcaactaagacgaccgtagaatcgctctctcagcatcccgttgtaaagtggaatatcggtgctgttgcagtagtatctaattcaaagggtgcttatgtctataccagttccaaacttgataagcgagaaagcgacaagctaaaaccacaaggatcaatgtggcaggtgttcggcttggaaaacggtgccgtcaaagttggcaagaaccaatattttgatggtcgcgccgtttacgtgaaggctaaccctatcgcatataacgatcaaaaacacgctgtcgccaagattgttctgcctcacacccacgccctagacgcgccaaaagctgacgctggcaaggtctacggcttggagcttaactccaaagtcgagatccagggcagagtcgggcgcttcttaaagattaaagagctacacaaaggcaagcaagtttatgtgacgggtaaccgtgcatatatcgtgttatagtagtaaaagcaaaaattaaaatttatatatgtagacaggagttgaaaaactcccaatatcgtgcaataagccaccttgtagacaaaagtctatgaggtggcttttttgcgtttcatcggacacacattcagtgtttactatccaataaataaatatttaatgttctatgttcataaacaaatattcaacattaggaaattttattagttttgaaaagaagtgtatttttctacaaaaaagtgttgtaaaaaacactaaaagtggtattatatatatgtaagcaaaaaacaaagaagaaatatgaggtataaaaaatgaagtttacatcaagagatttaatcaacaagtttttagaaaacatggacactcaaaagggtaagagcctagacattgctgtttcaaacatcttctacgataaagatgttttggacgacgaaaacattatctttgctgacgatagcgaagcttataatgcccttgaagaacttgcgcaagttcaaaaaggtaatgacggtatcttttcagtgattaatgttgctagaaaggttatgaaggcaaacgcggaagatgaaaaagccgaaattttaaagaccatggaaaacagcgaatacagggaccttaaacttgctaaagttgacgaagacttagaagttgaaatgcatgatttaaacagctcatggagcttagctcacaaatacgctgagtggattgctttaaaccgtatctgctactatactgttaaaaaccaaaatacctacttagacgatgaaaactttaaagaaattcatgacaagcttgaaagcttattagctaaccaagatgatcctagacttgatagagctctaggctaccgtttagtttcaattgaaaaataaaatatttagtaatgtgaagcgatgcagaacaatccgcatcgcttttttattcttttaaaaagtgtttttttatacaaaaaagtgttgcaaaatacaccaaaagtagtattatatatatgtaaggtaaatacgaaaaaacgaggtataaaaaatgagtatcaaaactttaaacgatcttattactgtattaaagaagtctattgcacaagatgaaaaagatggcgacagagaagccgcagaagttcaaaaaacacagttaaagcttgctgagcgcttgaacaatagtgatgatggttttattgcaagtattgaaaactatgacggtaaaactgtaatgtgtgcagacgatgaaactaaaagattttacattttctacacaaatgaagaagctacaggacgcagtgcaattcttggctatttaactaccgatgaagctaagcacattttagatgattgcaaagaagttatagatccagtaacttcaaccacttcttacgctgatcgcattgtcaacggctacaaaaaggcggtagaaacaaacgacgagttcactaaaactaagattttgcttcaattaaataatgaattcttagagcactacaacgatgtgtacggtgagaatgccatcattaatagattggttgatgatataactaaattgtataaatcaagaattattgatttttcagatttaaattaatgggcttatactcaaatgactaagataatttttgaaaaaagtaagataataacggaaacaaagaaggcggccttaattaagacaccttctctatataagttgtggctgccgaaatctttaattaaaagaaaaatgtggtttttagaagcttttcttccttcagatatgaaattcaaattattcactcaaaatagcgaattaatttgtacaagtaaagaagtatggggtgcttttaacgattcagattttgcagcaacgcaccataaggatgaagaagttatatatcacaaaccaaagaaaatgaccccgaagaaggtgcaagtcgatgactcccttaaacgataaccaaaggaaggcaattaaaaagttagaaaaattacgggttggtgcgctctttatggagcccggaaccggtaaaactagaacggctgttgaacttattaattcctctaaaacggattatgtactttttatagttccttttcagactaaacaaaatctagaaaaagagttaaagaagtggaaactgcgtcctaaataccgcattgaaggcgttgagtcacttagtgggtcagataggctttacttggaattgctaaaagaaattcaaagatacaagtttccttttgtggtgtgtgatgaaagtttaaaaataaaaaatattcacgctaaaagaaccaaaagagttatgaagattggcaaatatgcttactacaaattaattcttaacggtaccccaatttctaagaatgttttggacatttatccgcaaatgcaatttctgagccctaaaattctggatatgagttatcgtgaattttggaatacttttgtagaatcagagacgcaccaaagcttatattcgaattacacaatagtaaaagacaatgtgaacattgattatctttattcaaagattgaaccttacgtttttgatgcaaagctaagcatgaagatcaatcaaaacgaacataatgtagagtacacttgctatgattcgcatgcgtattatcaggctaaacaagaaatgcttgacaacctatcctttatggaagacctagactttttagcaatgacgcaaaaaatgcaacattcgtactcactggatttgtggcatatagaggcttgtaaagatgtgctaaaaggacttaaagggaaaacaattatttttgtgaagtttttagatactaaggactatctacaaaagaagttcccacaatgtaaagtaatgacttatggcaagggatcttttgggttaaatcttcaagaatacaaaaacataattttttatgacaaaacatgggattatgcccaattagagcaagctaagcggcgaatttacaggctgggtcaatcagaagatgttgattactactttttaactagtgatctgggtttagataaaatgatgagaaattgcgttaaaaacaaaaatagcttgcttaacttcttcaaagacgcaagtaaacgattggaggctgtaaatgagctctaaaaattatttaaacatcaacgtttacgaggctacacaaaagagattgaagtatattttttacgaatttgataacgtcttagttgctttttcaggcggcaaagatagtggcgtactgcttaatcttgcctaccaatacgctaaaaggaatgatcagcttaataagctaggtatgtatttttttgattatgaggcacagtacactgcaactataaaatttgtcaaaaagatgtttgatcaatttaatgatattaaacggtattggctatgcttacctaattctgtacgaagtgctacatcaatgactacgggcacgtggatgccgtgggaaaagtctaaaaaagatatctgggttcgccctatgcctagaatggattacgtaatcaatgaagataatgtgccgtggggctataagccagctgctactaatcatcagtcacaagagggttttactaaatggttttcttcaacacatgggaaaactgcgtttttaattggcattagagcggatgaatcttataaccgctatcgtgccattaaatctaataaaaaagccaatagctataaaaataaagagtatctggtagccaaaaatgacataacaattaatgcttatcctatatatgattggtcgattagagatatttggatatgtaatggcaaaaataattttccgtataatgaaatttatgatctttactatatggcagggatgccaattaatgaaatgagagtcgcatccccgtttatatcggaaggtttaacagttttacattattaccaagtgattgaacctgatacatgggctaagatgttaggaagagtaaacggcgttaatttcgccagtatttatggagaaactgctgcaatgggacagaaacccatcaatctacctaacgggatgacatggaagagctactttgaatttttgcttaaaactttacccgaacaaacgagaaaagattatcaaagactctttaaaggttaccaaaataggactacgccaccatacaagcgaatgtgtattacaatcatgaaaaatgatcataccggtaagtatatgggacctatcagtgctaaagcacaagaagaaaggagaagaaaaacaattgaaaaatacagcaaaattttgtagtccggcgtataaagtcagaccggtacccattgagaaaattcaagctaatgcttataaccctaaccacgtagctccgccggaaatgaagttactttatgagtctatcaaagacgacgggtatacaatgccaattgtttgctactaccttaaagatcaagataaatatgaaatcgttgacgggtatcacaggtataccaccatgttgaagcacaaagacatttataagcgtgagcatggtatgttaccagtaagtgtcattgataagccaattgaagaccgaatggcctcgactatcagacacaaccgtgcacgtggagagcatagcgttgatttgatggttaacatcgtaaaagaattaaaagatgaaggtatgtcagacgcttggattatgaaaaatattggaatggacgcggacgaattgctaaggcttcaacaaattggaggtttagctgcgatatttaaagacgaagattatagtaaggcatggaaataatgaatgatttagaaaaagcagaagcattgatggcaagtaaaaaatatagattggctgacatttgtaaagctaccggcattcctttaaatacacttaaatcttactcatcaggtcgaagtcctttaaaaacggtagcatgggaaagagtttaccgattagctaggtactatgaaaaagttcaaggataatgtgctataattgatttagcttatagtatgtatgttaagttgacataataaaaaccgctcacagtttggatgtgggcggcttgaattttacataaaatagacgttggagcttcaaaattttaaagaggtctccgaaaaggtctccagtttcaaaattaataaaaatcagtaaaaactaaaaatgcataaatccaggagtagaaatcggtaaaaattaataaaaatcattactaaatccctcacattccgtaaatatatatgaattggaactatgttaacatagttcctttttttctacctaatttttcatatataatggagaaagggaggaaatatcgtgaagctacgaaaactaattccatttttatttttaatatctctattagctataacattttccgcttgttcgacaaagggagaagagaatactgctaagcatagagttaatattgtaacttctactaatatttatgcagatattgctaaaaatatagttggtaaacatggtcatgtacaagctattataaaaaacggcgatacagatccacatgattttgagcctacgactggctctgccaaagaagtagctaatgctaatattgttattgccaacggtctaggatatgatgactggatgactaatttagccaatgctaatgatattcatgtggttaaagttggtaatcaattgatgggattaaaacagggggataatcctcatatttggtataacttaaacatgcctaaaaagtatgttgattatctagttaaaacagcaagtaaaattgatccaaaacatgcagcatattttaagtctaatgctgcaagctatttgcaaaagattgatagtataaagaaaattgctgctaaaattaatgggcgtgaagataaaccggtttatgttagtgagcccgtgtttgattatgcactagaacggtgtcattttaagattggcaatcaggcatttgaagaagctgtagaaaatgaaacggatccgagtgcgcaagttattcatgagatgcaagtcaaaattaaagctagaaaaattgctttctttgttaataatattcaagcatcaagtagtacagttagtggcatggttaaactagcagagcaacataatattccagttctcgatgtaagggaaacaatgcctaatggaattagttattattactggatgaaagcgaattatcaaaaattatttgaaattttttaaaaataactattgcataattagggactatcaggtaatataataaacgttgtgattgagagatcacggtggtaataactaataaaaataaataaaaaaagttcttgacttttaaaacatgattagttattataataaagtgctcttgattaagagatatgacccgttggtcaagtggttaagacacggccctttcacggccgtaacatgggttcaaatcccgtacgggtcactaatggaggattagctcagctgggagagcatctgccttacaagcaggaggtcacaggttcgagccctgtatcctccattgttcgggactaccgccgccgcggtagtctttttttatgcaaaaagaacgaacaagcaaaattattattttatcggttcaagtcctgagaggattcactatgattagtgaagatgccttgtaaccgaatagccaatgtctatatagggggactaatatggaaagacgtttgtttacttcagaatcagtttctgaaggacatccggataaagttgctgatcagatttctgatgcaattttagatacgatgttaaagaaggatcctaattcacacgtagcttgtgaaacgatcgtaactactgggatggtttttgtctttggtgaaatttctaccaacgcttatgttgatattcaagatgtagtgcggaagactattttgaagatcggctatgatcgtccagaattaggttttgatggcaataactgtgctgtgatggttgacatcgatgagcaatcacctgatattgctggtggggttgatcactcacttgaaactagagaaaacaagtctgataacgatgaattggatcaaattggtgctggtgaccaaggtttgatgtttggctttgcgattaaagagacacctgaactcatgccattaccaatttcgcttgctcatcgtttaatgagacgtgttgctgctttgagaaaagaccatactttagattggcttcgtccggatgctaaggctcaagtcactgttgaatatgatggaaacaataagccattaagagtggatactgttgttatctctactcaaactgatacagaagtttctaatgaagaaatccatcgggcaatgattgatttagtcattaaggaagttattccggccaagtacctagatgaaaagactaagtttttgattaatccgtcagggcgttttgttattggaggtccaaagggcgattctggtttaactggtcgtaagattatcgttgatacctatggtggttacgctcgccacggcggtggtgcattttcaggtaaggatccaacaaaggttgaccgttcagctagttatgcagctcgttatgtcgctaaaaatattgtggctgccggccttgcttatcgctgtgaagttcaattggcttatgcaattggtgtagctcacccagtttcaattatgattgatactgcgggtactggtaaggttgacgatgatttgttaactgaagcagtacgcaatgtttttgatcttcgtccagccggtatcattaagatgcttgaccttcgtcgtccaatctatgaacaaacggccgcatacggtcactttggtagaacagacgttgatttgccatgggaaaagactgataaaacacaagatttgcttgattatattaaaaataagcaataaataaaaagagaaagtaaaaaagaatgaaaaaaacaaacgtgcctatagtcacgcttgcgatttttatgacaacttttatgactgccattgaagggacaattgtttctactgcaatgccaaccatagtttctgacctagatgggctcgagattatgaattgggttatatcaattttcttgctaatgacggccgtttcaactcctttatatggaaaactggcggatagcattgggcggaagccagtttttttgtttggaattgcgttgtttgtcataggctcatcgctgtgtggacttgcacaaaatatggtggagcttatcttattcagagtaattcagggattaggttctggcgcggttcagccagttgccatcaccattattgcggatttatatgctctgcaaaaaagagcgaaaatgttaggtcttaactctggtttttggggagtagcatcagttattgcaccgctattaggtggctttatagttcagcatctatcctggcactgggttttctacatcaatgtgccaattggaataattgcctttttgctcgtaattttttgtttgcaagagcctaaacatagctctaagtctaagttagatttgcagggaaccatttggttagtaattttattgctagctttgatgtttttcttacaagatttaggttcaaacactaatatcgccataatggccgctctagccgttttagtggtaattagtataattatgttctttagagcagaaaagcgcgcagttgatccaataatgccactcactatgttaaaagataaggagttccttgcaattaacctgattacgttattgatttctggcgtagtaatcggctttgaattttacattcctacctggatgcaaggtattaatggtactaatccatctctagccggttttgctgtaacgcctagttcattaatgtggattgtaggttcgttcttaattggcgggatgctaggccgctgggggattaaaaagacatatgattatatgttattggttttagttgtggccgatttggttttgattttagtgccgatttacacatcattctgggtcttctgtgttattgctgcctttaatgggaccgcctttggggcaattacgacagcttcacaggtgagatcgcaggttttggtacctaaggatgacataggcgttgccacttcgtttaatacgctgatgaagtatctgggacagacaatgatggtttctatctacgggattgcttttaatacgatgttggcgcatgggttaagcaagagatcggggttgaatcaagaaatgatgaataaaattgtttctgcagaaaatgccaaaagtctggctgccaatgtagtgccacaattacggcaagttttgttaggcgggttaaaagctgtttacgttgtttctatgattgttattgtagtctcgattgtattgaatcaattgtatcgagatcgaaaattgaagaaaaattaagttgaaggagccacatgcaaagtagagcatgtggcttttttactggaaatttaatttcagtatttttattatatctacatatattgaaatattatttctatgaaagtaaaatagagttaaaagcaaggtgattaaatgaatgttagagatagaattttagagaattatacagagttaaaaaaatcatcacgtattattgctgatgcggtacttgaaaatccaaaaattttgttaaataaaaatgctaaagaaatagggaattatactaatacatctgcagcatcagtaattcgtttttgtaagcaattaaattataaagggttaaaggactttcaaatcgatttagctcaaagtactgtcaaacagtcacaacttaagccaatagatatgattgtaactaaagatgacaaagctgatgaagttatgactaaattaagggttagtttgagtcaaaactttgaagatttatctaagactattgatatcaaggatttacaaaaagctgtatccttaattaaaaaaagtcgagctgtgtatatagctggtattggggcttcaagcttttctgctaaggatcttttttataaactcattagaagtggaaaaacggttttttataatgatgatgtccacattgcattagagagaatatactattcaacgccaaaagatgtcatgatatgtttttcttatagcggattgactcaggaactattacttgcagttaaacaagctaaaaaaaataaaacaccaattgttgcagtgactagaaaatccgaatcccctttgagtaaattagcagatataaatttaaaattaccggatcatgaatcgctgatgagagttggtgctataaattcaacttttgctcaaatgtttatttcaaatgtgctttatttatgctcaatttcaagtgatttaggtgaggtaaaacaagaaatggaggctacaggaaagcttctcgaaaaattaaaagaaaggaatgattaatatgaatatcaaggatttaactacagagaaaagaaacagtgcaactatgcatatcgataatatgtcaactttagatatggttaaaactattaataaagaagatcagaaagttgctgaagcagtaggaactcaggaggagcaaattgctcaggcaattgacatggcttctaagaaataccatgatggtggacgattaatatatattggagctggcactagtggaagattaggtatattagatgcagtagagttagtaccaacgtatggaattagccctgatcgtgcaataggattaattgctggcggtaaaactgcaatgtatttagctgttgaaggtgcagaagattcagaatcacttgctgctgaagacttaggtaagctaaatttaactagtaaagatgtagttctaggattagctgctagtggtcgaacgccatatgttattggaggattagactatgcacaaaaaatcggtgcagggacaatttcaattgcctgtgttaataatagtttaattggaaaacatgcagaaatagctattgaagctgtagtagggcctgaagtaattactggatcaactagaatgaaagcaggaactgcacaaaagatgatcttaaatacgatttcaacgggcgtaatgattaaacaaggaaaagtttatcaaaatgttatgattgatgtcttgcctactaataaaaagctagtaaatcgagcaattagaattattacgtcagttactaacgtatcaatagagcaggcgaaagatgtcttgcttaaagctgataaaaatgtaggattagcaattgttatggcaaaaacagggttaaatagtgatgatgcaagtaaactattagaaaaaaataataacaatgtcagccaagttttaaataattagctatactttgaaattaaatttcaaaaatcattgattatatgtcttaaaagtgatatttttatatttaagtaagcgcttactaataaagaataatgaaatattatttctatttgtacaaaaattgcatattagtgattgctttttcaaaagagttttgataatactactttgctaatgaatattagtaataagtaagggagggagaataatgaaacatcgcaattttttattagttgctctttcagttttacttttaggagcaggcttaactggatgcagtcagaaaaaagaggctacagctactccggctgttacacctcataagagtcaagttgttacaacaactatgtattcgaaaaaattacatatggattggaattatgatgtatatttaccagcaggttacaatccaaaaagcagtaaaagatatcctgttttatatatgttgcatggaatctatggtaatcatagaaacttgctagaaagatttaattctcaacaaattcttgatggagaaattcatcgctgtaataaaaagatgatcgtagtttttgttgatggctttaatagcttttatattaatcaaaagcaaggtgggatgcagatggaaagtgccatcgttgatgacatggtccctactattaataaattgtataagacagaaaccaatcctaaacatgtaggtattggtggtatctcaatgggtggatatggtgctgccagattggctttgaaatatccagatatttttggaaatggtgttctaatttctcctgcagtttggtaccgcttgccgaataacaacccaattaaaacttcacagtatgcttttcaagatggaaaaagtaactgggattggaaattttatgatagtgtatttccaactaggtacattaatagtaaatcagagaaagataagttctttgtagagactacttcaagtgatactaccgttccagtaaaaaatgtcgatcgctttgtgaaaactcttaaaaaccatgacattagtgttaagtttgtaagagacaacggtggcaaccataattgggcttattggacttcagcagctccacaagcttatcaatgggcattagataatttaaattaggaggtgtaaaaaatgagcaaagatagtgaattagccagtagcattttgaatgatattggtggtaaagacaacgtttccgcagttatttcatgtatgactcgtctacggattagtgttaaagatgattcaaaaattaatttagatcagttaaagcggcttaatggagttttaggagtagttcagtctgaaactttacaagttgtactgggaccgggaaaggttactaaagttggaactgaatttagtaaattagccggtgtgccacttggagaagaaggcggcgatgattccaatgaaacattagatgaagttaaagctagagctcaaaaaaataaagcggcacaaaaagctaaacatgataagcctttacaacgtggattgcatcatattgctaatgtttttattcctttacttccaggaattattgctgcaggtttagtcaatggtatctgcaatgttattgattatcaatctggtagtgcttttgccaatgattggtggtatttaactattaaaacaataggatggggactatttgcattcttaccaatctttgtagggatgaatgcagctaaagaatttaaaggtagtgcaattctaggtggaattggtggtgtattctgtttaaatttaacaggttttgctgcgtaccctttaaattcactggcagtatcaatgccattcactaataagccatatgttgctggtgttggtggtttgcttaccgcactgtttatggggatctttatcgcatggacagaaagacagattagaaagtttatgcctaatgctttagatacattcttaacacctctttgcaccctgatcttttgtggtttaatttcagtggttttcttacaaccagttggtggttggctaaccaatattatttacgtggctatggacttcttatatgataagttaagctggttcggcggttatattttatcgtcaactttcttagcattagtatctgttggtttgcatcaagctttaacgccaattcatgttatgctgaatgaccctactggtccaactcatggaattaactatttacttcctattttaatgatggccggaggtggtcaagttggtgctggttttgctctttggcttaagagcaaaaataagcgttttaaaaatatggttatgagttcaattcctgtagctattttaggagttggtgaaccattaatgtatgctgtgaccttaccattaggacgtccatttattacggcttgtcttggtgctggtttcggtggtgttgcagcatcattattccatttaggtactgtctcacagggggtatctggattatttggactgttaattatgcagccaggtcaacaggttgaattcttgattgctttgttaatttcttatgtaggtggctttgttttaacatggttctttggaatagatgaagcaagaattaatgaagtctttcctgaatgataaaattaaagaagtaattgaaatcattgtaactattacaatgatttttatttttaacggagaagaaaaaatgctaggaatatctgtatatttccaagattatgatgaaaactatttgaaaaaagcagctcaagctggtgcaaaatacgtttttacgtcacttcagattccagaagaagattattcagatctggatcaaaaattaccgagattttttgaattgtgcgatgaattgggacttgaagtaattcctgatgtttctccggctacattggaaaagctaggaattaaaggaggcgattttgaagccttaaaagataagggattcaaggccttaagattagattatggttttgatgactttgatttaatcaaaaagctacaaagaaatttctttattttattaaatgcaagtgttgtgtcactggactatttagatcgtgccagaaatgcaggggttgattttggtaaattagctttaacatataatttttatccgcatacagatacaggtatgggatggacagattttaaacgtaagaattggatgttaaaggactatggcttaagaactcaagcttttgttcctggggatgcacttaaacgtttcccactatatgaaggcttgccaactgtagaaaagcatcgtggagtttcgccttacgttgcagctgttgaattaattcatgaagcaaatgtggatgatgtgtttattggcgatagcaaggcatcaatcaaaaatcttcggtatattgtagattatcaaaaagataatattttaaacatagaatgttcgctattgccacaatatcaacagctgtatgatcaagtgattgaagtaagaaaggacatgccagaaaagctgattcgcttaagtttgcctagaaaacctgatattccaatttgtaatactttaaataggcgtaaaggcactattacaatgcaaaacaaattagctcaaagatatagtggtgaagttagtctgattaagtcaaatttaccttttgaagcacgtagtaatgtgattggttttatttcacctgagtatgtgaagttgcttgattttattgattcgagtacgaaaatcatttttagaaggctgacatagaagaaaggtgatattatgcttaatttggcaaataagatttcagatgtatatcctaatttgaataaaacttctaagttgattgctgatgtttattttaaagattcaactcttttcctaagtaaaaacttgcaggaattaggtgctattactaaaacaagtggcgcatcagtgattcgattttgtagaaaattgggtttcaaaggctttaaagattttcaaatagcttgtgcacaagaaatacctggcaagcaagataatacggtggatacaattattaatgaaaatgatgagccgaccagtgtgctttacaaattacagattagtttagaaaaaaatattgcagacattggcaaaacaattgatcatcaatctctagcttcagcggtacaattaatgcgagccgcacagaagatttatgtagcaggagagggtgcatctggcttagccgcacaggatttattttacaaattaattcgtagcggaaaagatgctgctttcgtccaaagttcgcacattgctttagagcaagtagctaatattaagacagaagatattttaattaccttttcttatagtggattaactcaagaaccactgctaatggcaaaacaggcgaaagaaaatcaagctaaaataattgcagtaactcgtgcccagaattcgcccttaaaggatattgctgatactataattgcgttaccatcaaatgaaaaattgttgcgttacggcgctgttaattcactatttgcagaaatctttgcttctagcttgctatatttgagtcttatttcgccaaatttaaaagaactaaatatgaaaatgaaaactacgcaaaatttgactaatcaattaaaagtgtagaatctataaaataacaactaaataaattttaaaaaatcaaaaatattttcatgatgaaaataataaaaataaagaaaaaaaggaccagtttggtccttttttagtactttttttgcggttggaataaatctatatttgacaatgctataattataaatggaaagtggcctaaaaataagataacactattgaaagcgcattatttgcctccttgaaagtaaatctaagtagctgtacacttaaattgagctgaataacgaacgttattttttggcagagacttgtaatgcgagtaggaattatgggggcgtaaaaatggatattactagtttagcaagattccaatttgctatgacgacgatctttcactttttcttcgtgccattttcaattggtacgatattcgttgtcgcaattatggaatcaatgtatgttcatacaggcaagcctgaatataaaaagatgaccaagttttgggctaatatctttttattgagttttgccgtcggtgttgtaaccggtatcattcaagaattccaatttggtatgaattggtccgattattctagattcatgggggacatctttggtgctccacttgcttttgaagcattgttgtcattctttattgaatctacctttattggtttgtggatgtttacttgggataaagtggggaagaaattacacttattctttggatggatgatcgtctttgggacaatgacttctgcattatggattttaacagcaaactccttcatgcagcatcccgtcggctttgctttacgcaacggtcgtgccgaaatggctgactttggagcacttcttaagaatccacaattaatgtatgaatatggtcacgtaattgttggtgcacttttaactggtactacaattttgactgggttagctgctttccaactattgaagaaacgtaacctttcagacattaacaagaagatctatcgtaagacaatgcgtttaggcttaatcttaatgttaattttctcagctggtgaaattgctgtgggtgatatgcaaatgcaatatactttgcatgatcaaccaatgaagttcgccgcaactgaagctgtttataagacaactggagaaaaggctccatggacggtagttgcaattgctaatccaaagacccatgaagttaagggaattgatattccagacatgttaagtattctttcttaccacaagactactggttctgtaaaaggtatggaagaaattaacaaagaacttgaaaagaagtatggtacacatattgatggtcgcaagatggactactatgtaccagttaatactttattctggtccttcagagtaatgtgtggttttgctgcattattattcttgatggcaattgttggtttaatcatgactcgtaagaataaagaaaccctttataaccatcgttggctattatggatcttcgcacttcttacattctcaccattcttggctaacactgccggttggttaattaccgaacttggccgtgctccatggacagtttatggattatttactattgatcaaagtgtttcaccgaatgtttcagtggcttcacttttaacatcaaatattgtttacttctgcttatttactattttagcaattatcatgattgcattggttgttcgcttcatgcacaacgatccagatgaatatgataaggctcaagaggcaagcaaagtagttgatccgttctcaaagggggccatttaaaatgtcatttttacaaatactttggtttatcttaattggagtattgttctcaggcttcttcttccttgatggttttgactttggggtaggaatggccgtgaagactttagctcataatgaacctgaaagagatcaagttgttaggacaatcggaccagtttgggatggtaatgaagtttggttgattactgctggtggtgcaatgtttgcatcattcccatactggtatgcaaccttattctcaggttactatttaattttattattgatcttagttggcttaattattcgtggtgtgtcatttgaatttagagcaaaatgtgctccatatcaaaagcatatttgggataatgcaatggcgatcggtagcgtaatggccacctttctctttggggtaatgtttatctcaatgattaaagggatgccaatcgatgctaaaggcaatatttcagctagcttctttgactactttaactggttctcaatcgttggtggtattgctttaacacttctttgctatttgcacggcttaaactatattactattaaaactaagggcgttatttcagatagagcacaaaactatgcacaagctttatactgggtactctacgtcggtgaagttgtctttgctttattattgattttccaaaccgacttcatgagagtacatccaattgcaactttagtatgcttagcattaattgttggtttctctgtagcagcacatgtagctactttcactaacaagcaaggaatggctttaacttgcagtggattaacgttgatctcattggtcgccttaatcttctgtggtttattcccaagagtaatgatttcatcaatcagcagtaaatatgatttgttgattcatagtgcatcatcatctaactacactttgattgttatgactgttgctacttgcatcttggtaccatgtgtcttggcttacaccatctgggcatattggatttttcgcaagcggatttcaatgccaagaatcggagaggttaaataatgattgataaacagctatttaaaattgatggcgctggttcaatcttaaaaaaacttgcagggcttgagattctgcaagctttttttatagtaggacaagccttggcactagcgtcagtcttaagcaaattgtgggcaggtcaacctctcgattggctactactaattacttttgcagcttgctttatcgccagacaattgatcagcacactgagagattcaatgttagaaaaatattccggtcgggttgcagaagaattaagacagcagcttttaaataaagtctttcgtgatggacaggctttagtacaaaaacaaggaaccggtagtttgattactatgtccctagatggtgttgatgaggtcaggcaatacattaagttaatctacagcaaagttttaacaatgatgattgtgccagttttaatctttgtcggcatgctgtttttaagctggacatcagctgtgattctgctagtcatgtatcctttaattgtcttattcatgattatcctaggtcatgctgcacaggatcgagcaattaaacaatttggtaactttcaggttttatctaataactttattgattctttaaggggaattgatacgctgaagtatttaggcctgagtaaaagatattccaagtcaatttttaacttgagtgagggttttagaaaaaagacgatggcggtgctaaaagtagcaatgctttcaacttttgccttagactttttcactaccttgtctattgcaatcattgctgtttttcttggttttgacttgatgaatggtaaaattgcactttttcctgctttaggaattctgattctggcgccagattattttttgccaattcgagattttgcgggggatttccatgcaaccttgaatggtaaaaatgcctttaagcggatcaacgaattgattaatctgccagaggaaaaaactaatgatttacctttaaaaacttggtcagctcaagatcaattgaagatcaagaacttgaagtttacttatcaaaagggaaccgaaattggaccggtttcattacaagtccaaggattcaagaaaattggcattatcggaatgagcggatctggtaaaactagtttaattaacctgctcagcggctttttgactccggatcaagtgcaaattgaactacaagggcagaaaactacgaccatgaatattcctgcttggcagcgtcaaatgacctatattccgcaggagccatacgtttttactaagagcttgcgtgaaaatattgctttttataatccgcaggcaagtgatgatgaaattaagcaggcgattcatatcatgggtctggatgccttgttaaatgatttgcctaacggacttgatacggtgattggccgcggtaagcgtgtcttgtctggaggtcagtcacaaagaattgccttagcgagagcatttttggatcctaagcgaaaaattatgatcttcgatgagccgactgctcacttagatatcgaaacagaaattgacttaaagaagcggatgatgccattaatgcaaaataaactggtcttctttgcgactcacagactgcattggttaaaagaaatggactatattctagtgatggatcacggtcaattggttgagcaaggaagttatgagcaattgcagcaaaatcaaggctacttctgcaagttaatggcaggaatgagaggtgaaaacaatgatcaataagattccggttttaagagcattaaaaaatgatcgttgggttcgcccatatttggaaaaatatcgtaaaacgttgattttggcgattgcactgggcattttaactttcgtctgtggcgggggcttgatgttctgtgctggctatttaatcagccgttcagcagctaaacctgaaaatattttgttaatctatgtgccaattgtcttaactagagcatttgggattacgcggccagctgtccgttattttgagcggctggttagtcacaattgggtgctcaaaatgacctccaaatttagacaacagctttatgactcattggagcgcgatgcgactatttttaatagtaagtatcagctaggaaatattctgggacttttgtctgatgatgtcagccatattcaaaacttttacctaagaacgatctttccaatgtttgtagcttggggcttgtatgcaattatcgtaattggcttaggcatcatttccccactgatgggcatttggatgttgatcctgtttttcttgattatttttgctattcctatttggtcagtcttaatcaatggtgcgcggcaaagctatgaaaaaacggttcaagacaagctctacgttgatttgactgataatgtgatgggagtagatgactggattttgtctggccgcagcaaagaatacttggccttgcatgtcaatgatcaagataaatttttgcaaatcaacgcgaagatgaaaaaatttgatcgctggcgcgactttgttttacaaatcttctgggtgttggtaattgtgagcctagtaatttggggtgctgccagatttggcgggcgttcaacttattatactaattggattgcggcatttgctttggcattattcccgactgttgaggcttttgccagtttgccgactgctgctcaagagacgaatatctacaaagattcgcttaagcgtttgaataatttgccagctcctgatcggactaagcataaaccaatcaaattaaccgcaccgtttaatttagtattaactgatgtgcattatgcctaccctcaaactaataaagaggttttgcatgggatcaacttaaatatccatgatggtgaaaagattgctattttgggtcgtagtggtgcgggtaaaagtactttagctgccttgctcagaggtgatcgggtaccagctaaaggacacgtaactttaaatggaattgataccagcaagtttggcgatcaaatgtccaattactttagcatcatcaatcaaacgccatatttgttcaataccacgattgccaataatttgcggctaggtaatgaagatgccacagatgagcagctatgggacgttttgcgccgagtaggtttggccgagatggtgcaaaaattaacggatggccttgatactaaggtggatgaggcaggattacgcttttcaggtggtgaacgccatcgtttagccttagcgcgaatcttactgaagaatacgccaattgtcttacttgatgagccaacagttggcttggatccaattacggagcaagctgtaattaatatgtttattaaggaattatccggtaaaactttaatttggattacacaccacttgcaaggaattgatcagatggatcaagtaatttttattgaagatggacaaattaatatgcagggtacaccggaaaaattatggcagacagagccgcgttatcgtgaattgaaaaaggctgatttaggattatagaggttcattatgctaacgaataaagtgccagaacaagatgtgcatgacctatttactagggtcgcacctaagtatgatttgatgaataatattgttagtttagggattcaaaagagttggcgtaagaaatttttacggcagttagatttaaataaaaattctatttgcttagatttgtgttgtggtagcgctgattcaactattgatttgactaaaaaagctaaattagtgactggtctagattttaaccaggagatgctgaagattgcccaaaaaaagattcgtcaaaagcagctgcagtccaagataaagttgattgcaggggatgcaatgaatttaccttttgcggccaatagctttgattgtgtaactatttgttttggcctgcgtaatgtccctgacgctgttaagacgattcaggaaagctaccgcgtacttaagccgggcggacaatttgctgttttagaaatgtctcagcccactaatgcattagttaaattgggctggcaagcttattttaaaatttttccgtattttgctaagttgacacacggtaatatcaaggactaccagtatttgtcaaaaacaagtaaagaatttctctcggctgagcaattaaaaaagctacttgagcaaaatggttttactcgagtagcggttactaagttaacttacggtgcaggtgcgattcatttgggacgcaaagactaaagcgttcgattgactaatttacgcgtcatctttttgagcaagacggtcgcattagtttgcggcagttgggctaagttagctaatgcccgattagtgtattgttcagctaaggcatgagtttcttcaatgactgagctgtttagcaaaatcttttggatttgttcgatatcgtttttgctcatttgtcgctttttttcaagtagcggtactaattgctctcgtaattcctttttgctaagagctagcagaataggtagagagtagacgccggtagtcaaatcttctagcgttggcttgtttagctgcttgccgccagtgtaatcaagaatgtcgtcaacaatttgaaaagcaatgcctaaattttcaccaaaggaggctaaagcttgagtagtttgctcatctccattgccaaaatggcttccttcttcggcagctaaacgaaaaagtgcagctgtctttcctttaacattagttaagtagtcgttgaaatcttggcttaggttaaaacgttcagccatttggcctaattcaccagcaagtaaatggtgcattgtgtgagcatttttgatcatgtaatcttgttcggaaatggcgttcaaaattaggtcaaaaaagtgcgtaaaaagcaagtcgccagcgtaaactgcggtgtctttgccaaaacgggcttggatgctaattttaccgcggcgctcgtcagaatcgtcaatgatatcatcatgaattaatgaggccatatgcaaaatttcgattgatgaggcaagttgaataatttgttttgatacagtttcttttttgctagcaatttgagctgacaaaattagtaaactaggccgtaaatatttaccaccgttactagccatttcaaggagtgcatcttgcaagtctgaatatggagtgcggatggttgcctgaattaattgattaacttcttcaagcggtttacgaataagtggatatttttgccaaggttgagagttattcatgatagatttccttataatagagttaacagaatagtgatcctttgaaaggatgtggatcgatgtcattaagtgtatttttagaattaattgagattaaagcaaaaaccgctagtgtcattccctttttcttagggatgtgctacagcgtgtattattatcaccaagttaactggggatttgccctagtcttcttcattgcaatgctactatttaacatggtagtagatatgtttgataactactgtgattattatcacgcagatagcaagaattaccaagagaagactaacattatcgggcgagaaaatatttcacctaatttagttctgggattaattatttcctttagtcttattgcaattttattaggtttgtatctagtcgctaaagtaggcttgcctgtattgtggatgggcttgttctgttttatggttggttatttatattcatttggtccgcatcctatttccagcttgccactaggtgaattgttctctggtttcacaatgggcttcatgattgtactgctcagtgtttatatcaatagttttcaagcttttgattggaactggatcacaatcggtcgtatcttcttattagctttagctgataaattatggatttctaatttaatgctagctaataacttatgcgatgcccaagaggacgaggataatcaccgcaccacaattattcactttattggtaaaaaaggtggcttgattgcttttagtatcaaaaatgttttagcatttttagtaatcttcctcctaccgtttttgggaattgctcctaagacggtttggttaacagtaataattgtaccgttcgtttataagcagaacaagatcttaattggtaaacaagttaagacagagacatttatcacaggagtaaaaacgttgctagttggttcactgacttacttaataacttactttttaggaattctattttagagaggttgaaaattatgaaaacagttgtagttttaggtgctggttttgccggcttgaaaacagttgtcgctttgcaaaagaagttgcgtgaacaagttaagattatcttagttgaccgtaatccataccactacgaaacaattcgcttatatgaagtggctactggtgaaattccctacactgggatgtcatatgaaattaatgatgtaattaatccgaagatgactactgtgattacggatgaagttgaaaaagttaatattgctgataaaacagttgagttaaaggatcatgctccacttaaatatgactattgtgttgttggcttaggctttaccttgagcaatatgggcattaaaggtgtaaccgaaaatgctttgccaatgagcaatgtaaaacaagctgaagctattcgcgaccacctttatgtcgaaatgaaagcttatcgccaagaccatgattctaaacacctgtcagtagtaatttgtggggcaggttttcaagcaattgaattaggaaatgccattgcaaaggttcgcccagaactagctcaaatggctggcgcccaaccagatgaaattaccatcagaatgattgatggttcgccacgtcttttgccaatgttccaaggtaaattgcttgattacgctttaaacacaattaagaaaaataaagtcgaaattattaagccagcttatgttaatgaagtaacctctacctcggttttgtataaaatggctaatgaaaaagacaatgctgagctgcaagaaattaaggcaggtactagaatctggatgatgggctttagtggcagtccagtaattgaggcatctggatttaagaaccgtcgtggtcgggtcatggttggtgatcatttaaccgcgccagaaagtgatgatatctacgtcttaggcgatgtttcaagcgtcatggttcctggtaagaaatggccatatcctaacactggtcaattggctctttcaatggctaactacgctgcaaaagatattaagagcagaattatgggtcaaactagaccggataaatatgcttaccatgacttaggtgtagtagttaacttgggtaattcagaagccgcaggattggcaatggggcatgcttttaaaggatactttgcagcaactcttaagaagattaccattgataagtcggttcttgaaactggtggtattaaagaaacaatggcgattggtcaatttgacttctatcactaaaattgaaaataaaagagaataaaaaatcacttcagtttgatttgatatgaaccccaaatttgggacatattattgaactgctttatttaaaaccatatttcgatattctatcggagtatggttttttagtactgttttaattctttcatgattgtagtaatgaatgtattaggactaaagtgtgaagttgcgccattttatgtcacaccaagaagacctgctattcaccacactatgggtggcttagtaatcgacactaaggctcatgttttaaataaggacggtcaaatcatcgctggtctttattcagcgggtgaaaatgctggtggtatccatgccggtaaccgtttaggaggaaattctttagcagatatctttacctttggtagaattgctgccaatactgcttatgaggataagcatgttaccgatgttattactggcgcttcgcagaaataaagatagagtataaaaaaatacagatatatcaatttaaatattggtatgtctgtatttctatttggagtcattttttccttaccttcgaataaaaacccatgatttctaattcttactaacaaaaataatagtaacttttctaacttcccaaaaaattttgcgacttttttgcgtaataaataatagaggataaatatcctcaaattatttaaggaggactttgcatgagcaaagagaaagaactaaatgtgtctgaagcattaggttttacggatgatttgatgtttcagaatgttatgagagatccagagatctatcgtatgtccttgaatgaggttctaccacatttggacattcaagatatcactgtatgcacgcaagaaaggattgcttttaaccaagaagagaaagtttcgattcttgatgtcctgattacggatagcagaggcaggcgttacaatgtggaaatgcaggtcgcgcataaagcagacatggataaacgagccaggcaatacctgttcaagatgatggaagatggctttttacgacgaaaacaagaatatggcgagctgcacgctgcatatgtaatttttattctgccgtttgatcccaaaggaaaaggcttgaagcgatatacttttgtttatactgctaaggaagacccatcagttgaattaaatgacgattctgcgataatatatttaaacacaaagggaacaaaaggcaagatcagacctgagcttgatgacctttatcgcatgattgaaggcaagccaacttcaaatggaaaactcgtcagtcgaattaaaaagtcgatgaacaattatcgtagaaccgaagaatggaggcaacacgtcatgaacacagaagaagtagcagaagcagcaaagcagcttggcatggaagaaggcatacatgaggcaactgttgcagcaatccataaaacgattaacatgcttagaaggatgaagcgcagtcccaagcaaatcttgcaagaattagaacaagattatggcaatgaattttctgaagaagaactagcagactttgtgaaaaacgcctagtcgataagatataatgatagctgtgaagctatcattttttagataacgggggcttgatcatgaataatcctgaagaattacaacattttttagatgttctgctaaaagagagtaactttaccagagcagctaaagaattatatatttcccagccttatttaacgcagctaattggacgaattgagaaaaaattaggcactaagatcatcaaccgagatgagagaccctatacgttaactcctgcaggtctaatttactatcaatatttggagaatgtttcatataataagcagcaattagggcgcaagctggaggcatatactcatcctgaccaacagataattaaaatcggcattttggagagcttaggtacatatttattgccagaaattttgccgcaatttttgcaagaaaaccccaacgtcaagattcagctatttgaaaatttccccagagaaaatgaaagaagactgcttaatggcgagctggattgttatattggtcagacgccagaagcacttgactcgagtttagatgtggttgcgggtggcgaggaacgctattacgtagtgatttcgccagcctcaccatattaccaagcaggaaagtttatcttaaattcggatgaacttgatctaaaagaggtactgcaggagcctttagtgttgagttcacctggttcagctatccggcatcaagttaatggcttatttcagagattaagactcgaaaaaaatattgtgatggagtctaatagtattattactgcaactaacttggcaattcacggcgtgggtattaccatttcttcggcaagtattatcagaagaatggaacaaacgccaattaacttgttgccactagatcgaaagttaatggatgttgtctttttcattactagcaaaagcggggaaaagtcgccagcgttagaaaacctaatttcaatttttcaaaagacgcatttacaagcaaaaataggataaagaaaaaggcatcatgcgatgccttttaaattgctttgatttctattgttttcgtttcatgtcgatcatcttcggctcaatgtagaagtgatagaggaaggaataaccaagcagtacaaaggtaattccttcaatccaaccgccgaatacatcagatggatagtgcacgtggacgaaaattctggtgtaaccaatcatcagtgggaataaagcccaaataataatcaataaagtcttccagaatttgcttctcactaaaagaatggttaggataatcaaaacaccaaatagcgccgcgctaccaactgagtgccccgatggaaaactataaccatccgcataaactaagtgcttgaccgttggacgctgccgcattgctgcgtgtttgataatccaattatagccattagcacagatcatgacaccagcggtaaaccaagcgtatgcatattgcttaaagaccagtaaaactatgaaaacaatgattgtttcaattgtgatcacgcttgtattgccgagattagtaaaatctttagcaaaagcgacattagctggattattgttgcaaacaatgttgaccacagcattatcaaaattgtgaataaattgtgagccggatgaaaccagtgcggcccagacagcataaataaccacgaagcagataccaggtattaaggtgtccttaggtggtcgtttcgtattaatcaaaaaagtactcccctcttgaaatttatagcatttgtggtaaattataatcattatctataagaaaataaaggtcgagaagtagtaacaaggatatttttttcagagagagactggttggtgcgaagtcttagaataaaattgtgaactcgtctcttaataaaacctagcgttgccatccgcgttaaggagcaattaagtgtcacaattttgtgaaacttaggtggtaccgcgatgattcgtcctatgattttttcatagggcgttttttgatagtaaaggagagtttatcttgtataaccacaaagtagttgaaaagaaatggcaagattattggtcaaagcatgatacctttaagacaggtactgaccctgataagaagaattattatgcattggacatgttcccattcccatctggtaagggacttcacgtaggtcacccagagggctataccgcaactgatattgttgcaagaatgaagcgtgcacaaggctataatgtgcttcacccaatgggctgggatgcatttggtttaccaactgaacaatatgcattgaagactggtgaagatccagaagttgttactaagaacaacattgctaactttaagcgtcaattgaacaagttgggcttctcatatgattgggaccgtgaagtaaccacttcagatccaaattactacaagtggacgcaatgggtttttgaacaaatgtataaaaagggcttggcatatgaagctgaagttcctgttaactggtcaccagacttaggtactgttgtggctaatgaagaagttatcgatggtaaaactgaacgtggtggctacccagtatatcgtaagaatatgcgtcaatggatgcttaagatgactgcatatgccgatcgcttattagaagaccttgatgatttggattggccagaacccgttaaggaaatgcagcgtaactggattggtcgttctgaaggtgcgcaagttactttcaaggtaaaagacagcgacaagacttttgatgtctttactactcgtcctgatactttatttggtgttagctatacagttcttgcaccagaaagcaagcttgttcaagaaattaccacacctgaacaaaaagaagcagttgatgcttacattaagaaaattgaatctaagtctgatcttgaaagaactgatttgaacaaagataaaactggtgtcttcactggtgcctatgcaattaacccagttaatggcaaggaagtgccagtttggatttctgactacgttttagctagctacggcactggtgcagttatggctgttccagctcatgatgatcgtgactatgcttttgctactaagtttggtttgccagttaacccagttattgaaggtggcgatattgaaaaggaagccttcacaggtaatggcaagcacttcaattctgagttcttagacggcttggataatgaagaagctaaaaagcgcatgattgaatggcttgaagaccataactgtggtaagaagaaggttaactacaagttgcgtgactgggacttcagccgtcaacgttactggggtgaaccaattccagttattcactgggaagatggaaccacttcattagttccggaagatcaattaccacttcgcttgccacatgcaactgacattaagccatctggtaccccggaaagtccacttgctgacttgactgactgggtaaatgttgttgacgaaaacggtagaaaaggtaagcgtgaaaccaacacgatgcctaactgggctggttctagctggtactacttgcgttacgttgatccacataatgataaggaattagctgactacgatttgcttaaaaagtggcttccagttgatctttacatcggtggtgcggaacacgctgtgcgtcaccttctttatgcaagattctggcacaaggttctttacgatttgggtgttgtgccaactaaggaaccattccagaagctttacaaccaaggcttaatcttgaagaatcacgaaaagatgtctaagtctaagggtaatgtagttaaccctgatgaggtgatcgatgaatatggtgcagattcacttagaatgtacgaaatgttcatgggtccacttgatgcatcaattgactgggatgacaatggtcctgcttcaactaagaagttcttggaccgtgtgtggcgcctctttgtaaacgatcttgatttgaaggccattccacaagaaagaatcgttgataagaatgatggtgaacttgacaaggtttatgcagaaacagtcaagaaggtaactgaagactttgaatcattacactttaacactgcaattagtcaaatgatggtcttcatgaatgctgctcaaaaggctaagaccattccacgggaatacgcagaaggctttgttaagcttttagctccagtggctccacatatgatggaagaaatttggcaagtctttggtcatgatgaatcaattacttacgctaagtggccaacttatgatccagctaagttagttgagtcaactgtagaaattatggttcaagttaacggtaagcttcgtggtaagttccaagctcctaaagacgctgcaaaagatgacttgcaaaagcaagcaatggaaattgaacacgtaaagaagttcttggaaggcaaggacgttaagaaagttatcgttgtgccaaacaagattgtcaatattgttgctaaataagttagattttcctaaaaaataataagaatacttattatttagatttattgaattgattagttgagacttttattgggaaaattttaatggaagaaaataacttaaatagcaaagatacacaaaatacttttctaaaaggttccgcatggatgacctttggctcaattgcctcgagaattttgggtgctttgtatattattccgtggtatgcctggatgggctcctacggcaatattgccaatgctttgactgcgcgtagttataacatttatacaatttttatcttaatctcgacagccggaattccaggagcaattgctaagcaggtagctaagtataatgcactaaacgaatatgggattggccgcaaattatttcgcaaaggcttaattttaatgaccgttttgggtattgtctcagctgcgatcatgtattttgcttcgccgcttttagcttcaaatgggagtcaaagtgatccaagacaggttgcagttatgcgtagcttgtcttatgcgattttaattattccaattttgagtatcatgcgaggctatttccaaggttatgccgatatgatgccaagtgcgatgtcacagtttgttgaacagtttgcccgggtagtctggatgttgctaacggcgtttgtaattatgaaactgcaacatggttcatatgttcatgcagttattcagtcaaacttagcggctgcagttggtgctttatttggaattggcttattaatttggtttttgttttctagaagaaaacaactagattatttggttgcccattctaataatcgcttgcgggtctcaacgactgaattatttggtgaaattattgcacaagcaattcctttcattattattgattcaggaattaccttattttcattggttgaccaatataccttccacccgatgattgccagtctagttcatgctagttcagatacaattgaggactggtatgccttgtttggtttgaatgctaataagttaatcatgattattgtttcgctggccagtgcaatggcggtaaccgcgattccacttttatcagcggcgcatactaggggagactataagagcatttcaaagcagattgctaatacgatggacctatttttatttgtaatgattccagctgcttttgggatggcagccatcagtaggccaatttatacagttttctatggtccagatctattggggagcaacgtactatatctgtcgtcatttaccgcgattagtttaggattatttacggtgctgatggcgattttgcaaggtctttcgggaaatggactggctatcaagtacctggttttaggattgattttaaaagggatcctgcaatatccaatgattttcctatttaaggtatacggtccgctggttgctactaatttaggtttattaattattgtggcactttctttaaaacatttggaagtgcagtatgattttaatttgaatcgaactagtagaaggctggctggagttacagcattttcagttggcatgttccttgtggttaaattatgtgaaatgggactaggcaagtttctcaatcctgatcatagatttaatgcattggtgctagtgattgtagctgtaggtgctggggttgtcttttatggcttggtgacattgaagacagggttagtccaaagcgtcttaggtagtaaggtagaaagtattttagttagactacatatggataaataaaagaaaatcaaactgttgtgatggcagtttgatttttttgttataaaaaattgcggctctttgtcaaatcttactgataaggtgtcaagtctaatttttcctggtagttgagtaaatttttggccgggggatggcttacttgagtaagtttttgtgcaatttctaagtgaatcaaccctaattgtcaaaaaactgccactccctcttgcaaagacgataattagtgttattatataatgcataagaaacgcaagaaatgtgtataaaaacaattatttttagcaaaggaggcaaaaagcatgattaatctgactgttaatacaatcaggcttagcggtgtcgctgcaagagcaaaccgcgtcatgttttaactgtcctttagacaaagtgaatcaaagataatttaacagcacagtattaagtacacccggtttatcggcggcatcgttaactgaagattttttgttatgcgtgttagctaatgaggtattaagatgaacaagggtaagactttaatgactggtgctgttatttttatgtgcgggagcatgctggcggcctgcggcaagagccaaggagcatctgtcaagcagaatttaaactggatgaccagtgcgaaaatcatcaccatggacccatccaaagccaccgacaccacgtccttccagcagattgaaaatacgactgaagggctctaccagctgggcaaagacagcaagccggttaaggtactggtcaagaagacgactgtcagcaaagacggtctgacctggacttttgaccttaagaaggggactaaatggtctaatggcgaaaccgtaactgccaaggactttgtctattcctggaagcggacggtgaaccccaagacagctagccaatacagctacattttctctgggattaaaaatgccgaccagatcgttgctggtaaaaagaaggccgatacgctgggcgtgaaagccgctggcaaatacaagctgcaggttagtctggaacataagattccatacttcaagcttttgatggccttctcagtctttttcccagaaaaccagaccgcagttgaaaagtatggctcaaagtacggtacgtcatcaaaaacgaccgtttataacgggccattcttgcaaaagggctggacgggctccaacttgtcctggaccatgttcaagaacaagaactactggaacgccaaagccgttaagctgcaaagcatccactttgccgtggaaaaatctccgtcaacggcctactacctctaccaagatggcaagctggacacggcaagcctgagctcacaagcctccaagaacctgcaaaagtcaccagactatgttgtaagaaagaccaacgggacgacttacttccaatttaacctgaaaatgaagaagttccagagcaccaagatgcgtcaagccatctccatggccctagacagaaacgccttagccaagaccttgggcggcggctacacgggctctaagaactttacggcagctggcatgaccaaggtgggtgacaaggattttaccgacctctctcaaaccaaggaaagcttgctagtaacgggccaccacaagcagctggcccaaagctactttaaggaaaggttgaaggaacttggcttaaagaagctgtcctttacggtgattacggcacacgtccaagtccatcggcgaatacttccagagtgctcttgaatcaacttttggcaagcaaatcgacgtcaaggtgcaaagcctgccaaccaagtcccaatttgccaagatggactctggtaactttgaagccacgatcagcggctggaatgcggactttgccgaccaaatttccttcctggactgcatgacctctactaatggctacaactcaggcaagtggatgaagctgctggcaaaggctgaaaacaccttgctggttgatcagcggctcttactacttcgaacacgtctacattgccaagtaagccagtaaaaaatgtattatcatgctaggtattatgtagtagaaagtgaagaataaagcgtaaattgctataattaagatagaaataagggaaaatcttaattagtgaaggagcgaaagataatgaaagactcaaattcaccaatttacaacatttggatggtggttctgctggttgccgcatatgtctggccaatctttggcttagcaccagccatctacctctttatcaagcgcaaggatgagaatctggtccctttgaagaattggattactctagccttgatctggcagattgttttgtggctgctcttgattttggttgtcgtctccttctgggtcggcgcctttgcggtcaaccacggttaactaaataactaattgaatagctagataaaagtcagtggatgccactggctttttgtctgcttaagcaaatgtcataactatatcactatttatagccttgaatagatttaatcggttacataatgcatcacgcaggtgatatctcacaaaaaattaacaaaagcatcaggttcaaagattgttaagccgatgttaaatagaactagcaagggtgaaagcggtacatttttttctttgttaagctaatgtaaactaagaaaaataacgttagaatattaaccgattttcgaaaaatggtaaagatttttccaaaatccggccagaatttaaacaaagttaagtattttactttgatttaacatttccccctgaatgtatttaacctccattaattactatttacttagtaagaattcaaggaggataattatgttaggcaagaaaactagagtagtggttatcgcacttgctctactggctatagtcgtcggctgcgttgttggcagttcaaaggcagacaccaagggtgtctctgggactgttaacgctgcggggtcttcagccctgttgccgctagtccaaagcgcagctaaatcattcatggatgaaaatccagacagcgtgatcaacaccaacggtggtgggtcaggccaaggtttacaacaagtctcagatggaaccatcgacatcggtgactctgacttgttcgcagaagaaaaattagacaagaagtccgcatccaagctggttgaccaccaagtggccatcaccgcgattgccccaatcgtcaacaaggacgccggggttaagagcttaaccacccagcaattgatcgatgtttacactggcaaggttaccaactggaaccaagttggcggcaatgactgcaagattgttttgatctcacgtcctgcttcttcaggtacccgggcaacttttgaacaatatgctttaaacaagactgccagtcgttcaaaccaatcactggaaactgacgactccggtactttgatccaaatgattcaaagcgttgaaggggctgtcggctacgttgccttatcatacttgactggtaacccagacgtaactgcagttgccatcaacggcgttaagccaactctggacaacgtttacaacggctcatacaaggtttggaactacgagcacatgtacaccaagggtcaaccaaagaaggctgctgttaaggcctttttaaagaagatgttaagtaaagaatacgaatcaaaggttgaaggcatgggctacggtgttgcttctaagctttcagacaaggctaagaaagaacacaagtaaaaggagagtgatttttcatggacaaggtagttcaaaaagccatcgctagcgataagcgctggcgggcagtatacattgcttgcgggctcttgattgttgctttgacgctcttgatgggggcattcctgctctaccaaggtagtcaaacctttatcaaggctcaccacagcatctgggaattcctgtttaccagcgactgggcaccgcttgacaagaccggcctgtttggcgggaaagtcggtgcagcagtttacatcgtaggttctcttgaaacctgtttgctggccctggttatctgcttgccatttgctatcggctcagcagtttacatgacggaaatctcaccaaagatcggtgaaaagtacttccgtccagctacggaaatctacgtttcaattccatccgttgtttatggttggtttgggatgaccaagctggttccattgattaaaaatattttccatccagccatgggtgggtactcagttttggccgcatccattgttttggccatcatgatcttcccaaccatcaccgcggtttccgctgacgccattaagtcagtgccaatgagctaccgtgaaggtgcttacggtttaggcgcaacccgctggcaagtaatcggcaaagttgttttgccagcagcttcaggcggcatcttgaccggggtgatccttggcttggccagagcgatcggtgaagccttagccgtagccatggttatcggtaagactcgctcatttgcggcaaaccttttgtcaccaaccagcaacttgacgagtgccatcgcagccgacatgggtaacactgcccaaggcggggaatacaacctggctctgtggaccatggcgctgctcttgttcatcatctcaattgtcttgattgtgctcattcacaaactggctaacggaaagaaggataaataatgaaccgtgctaagaaaaaagatcggtttatgaccggcgtcttttacgccatcggctggctgatgctagcattcttgctgtatttgacatttaccattatctttgatggcttgaagggctttagcccagacttcttaggggctgccggcaacgggatcttcaaccaattctttaacactctttacttagttttcctttcgctcttagtttccgtgccaatcgggatcggggctggggtttacctggctgaatacgccaaggaaggcaagctcttgaccatgctggaagtaagtatcgaatcactttcttctctgccatccatcgtaatcggtttgttcggctacctggccttcatcatgtggacgggaatgagctggaacatcgtggccggggccttgacgatctcaattttgtcaattcctttgatcactactgaaaccaacaatgcaattcgtgccttgccaattgaatacaaggaaggttctctaggtttaggtgcaaccaagtcagaaaccattagaaaagtcttgattccagctgctatgccgcaaatcttgactggggtcatcatggccgctgggcgtgggtttggtgaagccgccgctttgctgtacacgtctggtcaatccacttacatcaactggcacaacttctggaagattacttcacctacttcacctttgaatccattcagaagtggtgaaactctttcactgcacatctgggtcatgagaactgaaggggctttgaaccctaaggcaacccaaattgccaactttacttcagctgttttagtagtactcgcactgctctttactttagttacctgccgcatttcagacaagatgcgtaagcgcaataacggaggaaattaataatggaagacaaaattactatcgaaaacttgaacctttactacagtgatttccacgccttgcatgaccttaacatgcacattccaaagaatgaaatcacggctttcatcgggccatctggttgtggtaagtctactttgcttcgctgcttgaaccggatgaacgacctggttgaaggctgccggattgacggttcagttaagttagatggtaccgacatttatggcaatgaccttgacgtcactgttttgagacagagagtcggcatggtcttccaaagaccaaatccattcccaatgagcgtttacgacaacgttgcttacggtcccaagatccacggcgtaaccgacaagcaagaacttgacgaaatcgttgaaacctcattaaagcaagctgctatctgggatgacttgaaggaccgtttgaacaagtctgctttgggtctgtctggtggtcagcaacaacgtctttgcatcgctcgtgccttggctgttaagccagaagtcttgctgatggacgaaccaaccagtgcccttgacccaatttcaacttcaaagattgaagaattggctctgcaactgaagaaggactacaccatcgttatcgttacccacaacatgcaacaagccgtgagaatttctgacaagactggcttcttcttgctgggtgacctggtagaattcggtgaaactgaccaactcttctccatgcctaaggatgaaagaactgaaagatacattactggtcgtttcggttaaagaccagtaataattagatagagtaagaaaggcagaaacaatgactagatcaagatttgatgaagaattggacaacttgcaaaagtccatggaagacatcggcaagctgtgccaggaagccattttggaagcaaccaacaccttgtttacgggcgactaccatgaagctgaagactcagtcaacttgcaccgccgcatccacaagagcgaacggaaaattgaagacagctgcttgcgcctgttgatggagcagcagccagttgcgactgacttgcgggtgatcagttcttctttgaaggccgtttacgacctggaaagaattggggaaatctctgctgatattgcagaactcgtgttaaatgaacacctgtccatcgccaatgaccagctgaaccttaagtccatggtgcaaacctcaaccagcatggttgatgatgccgtaaccgccttgtccaccaagaatctggaactggcgcaagcggttatcgaccgcgacgacattgttgacgatgactttgaccatgcccgagaaatcctgatcaacaacttcagcaaggatggcaatccagaatacctgatcaacctgatgatggttgccaagtacttggaaaagatcggtgaccacgcggtcaacgttgctaagtggaccaagtttgtggcaactggcaaggccggaagataagtcttggaaagtttgctaaattaatattcttcctgatctatctgcatagcaaatgtttctaagctataattagagtagctatttgcagatagattagggagaatttttttatgactgaaatatggtgtgtggaagacgacgaaagcattcgcaaaatcgaaatgtatacgctggagtcgatgaactttaaggtgcgtggctttgaagacgggacgacttttgtcaaggccctggcggaaaagcatccagatctggtcatcttggacctgatgctgccagatgaagatgggagcgatattttgaaaaagctccgtggcaactcgtcaactgaagaattgccggtgatcatcgctagtgctaagacagccgaatatgacaaggtgaagaacctggattctggggctgacgattacttgaccaagccttttggcatgatggaaatggtctcccgggtcaaggcggtcctgcgccggaccaaccacaagaaagaagacaagatcgagaaagacgggatcaagatcctgctcaagcggcatgaggtttatgtcgatggtcaggaaatcgagctgaccttgaaagagtacggcctcttgaagctcttgatcacccatccagggaccgttttttcccgagaagaaattatggatcaaatttgggaaacgggcttttacggtgaaacgcgcacggtggacgttcacgtaagaaccttgagacaaacattgagtgaggctggtagccatatcgaaacggtgcgcggggtcggttatcgctaccatgaagggaattaatgttaaaaaaaatatttcgggcagtctttttatcaacggcagtcatgctggtctgctcggtggttttgagtgcgctttttttaggcatcgactatgatcacaatgaggtcaacaccttggcttcgcaggccgatttggcagccagcggggtcaacaatgggggaaggaagtacttaacccagctaaaaggagaaaattaccagattacctggatcaatgctaaaggcaaggtactctacgacaacgaggaaaacccagccaagatgggcaaccacgctaagcgcaaagaagttgctgaagccatgaaaaagggcgaagggcaaagcgagcgctacagcacgaccctgtcgacggttacgatgtactatgccaaaaagctgaaagacggcggcgttattcgggtggcggttacgcggaattcgatctggatgaccatcttgcaattgctgacgctgatgctgatcatcttgctgatcgccgtgattgcttcttggttcgtagctaagatgatctcgcagtccatcgtcaagccgctgaaccagttagacctggaccagccgcttgaaagcaagagctatgaagaaatcaagccgctgttaacccggcttgacagtcaaaacaagcagattgctgaccaaatggagcagctccaccagcgggagaaggagttcaagacggtcaccgatgccatgcaagaaggcctgatcttgatagacctgaacgaccaggtcctcttgtccaatccggcggtagtatcgctcttaggatcaaagtcttctgaagttttgccagatgatgttaaaaagatcatcgatcaagacaagcggaccgtccacaccgaagggatcgtggaaagagaagggcgcaacattcaaattagtgccagtccgattttttcacggaaggtcttaaaagggacttcgatcttggtcgttgacgtcacagaagaataccatgaagagcaggtccggcgcgaattcacggccaatatgtcccatgaattgaagacgccgctgcagtccatcatggggtcagcggagcttttggaaaacaacctggtcaaggaagacgatcggccagccttttaccggaagatccatgaatcttcagctcagctcttgaccttgatcgatgacattatccggctgtctcacctggacgaaaatccggaatttgaagaggtccggatgaacctgaagagtccggtgaccgaggcgatcgaagccttgcaggcgtcagctgacaagcacgagattgagctgaaggcggctttggccgatacagaaatcaaggccaacttccgcttggtttatgaaattgcctacaacctgatcgacaacgccattcgctacaacaatcctggcggccaggtcaagattgcggtcaaggaagtgcgggggcaagctattttgcgggtttctgacacggggatcgggattccgcttgaagcgcaaaaccgcatctttgaacggttctaccgagtcgacaagtcccacaaccgcaagactggcgggacgggacttggtctgtccatcgtcaagcacgcagtacagcagtgccatgggacgatccgccttgaaagtgaactgggcaagggctcaacctttaccgtggtcttcccagctttaaagcatgaagacaaattatacagccaaaattgcttatttgatctatgataaaggtgtcgaaagaaaataagagctctatttaaataacatagacataatcatgggctaagtgtatataaagtgtaatttagaactatacaatatatacgtaaaatcttatgattaaaggtgaacagatattatagccacttttttaggattcgattaatgtaaaaattacacaatgaattaataaaaagcgccatataataagcaaaaaaagtcatttaaataactaaaataaactgagacctaaaagttgagactgtaaaatagtttgtgtaaggatgaatgattccttaaatttatttctttaaacattagaaaaaggagttcctttctcgtatgattggtttgaacaaaaaaaacacatacagaaagaagaactccttcatgaatgattttaccaaagattttgctcaagctctattcaatccagacaaaataaatgatttattgcgcaaagaactacaacaggctgttaataacttgctagaagctgaattgactgcctttctgggctatgatccctatgccagaaatggctggaatactggcaactctagaaatggtgcttatttccgcaaagttgatacgcaatttggcccaattgaagtgcaagtgcctcgggatcgcaacggtcaatttcatcagcacacgctgcctgactacaagcagcactcggatatcttggaaagcatgattatcaagctttactccaagggcgtgaccaccagggaaatagccgatctaattgaaaagatgtatggcagccattacagtccagctcaggtatcaaatatttccaagcagatgattccaaaggttgaggcttaccacaaacgcaagctaagcgacaagtttttctgcgtctatttggatgcgacataccttcctttgcgccgagaaacgtttgagcgtgaagcagtctatattgccattggcattaaacctaatggacataaggaagtcattgactactgcattgctcctagtgagaacattgaagtctggacagatatgcttcaaaacatgaaatcccgaggcttaaagcaagttgagctttttctttctgatggtgttgttggcatgaaaacagccttgaccaggacttatcctaaagctcattttcaacgctgtttggttcatgtcatgcgcaatatctgcgctaaagtacgcgtcgacgatcgtgaaaagatcatgaacgaattcaaacaggtgcatcaacagacaaacaaagaagaagccacagctgtcctgcatgacttctataccaaatggggcaaggtttacagccatgttatcagaagcttgaaagacatagaaccagatctgctggtcttttataactatcccaagcagatcagagcttcaatttattcgactaacatgattgaatcatttaacaatgtgatcaagcgcaaagctaagcctaaggcagagtttccaactgaacagtcgcttgatgcttttattggtattcaggcaatgagctacaatgaccgttatttcaatcgaattcataaaggctttggtcaggttcaggacaccttagaatcctactttgattaaataaataattaaaaaatcaatttacgagaaagaactatttacacaaaagatttgacagtttctaaaagttagacacttttaggtctttttctacgtaaagtcaagcataataagaagtttggcttcattttttgtttaaatttcaacttaaacatcttttagtgtcgatttatttttttagttagacacgacaaataagcccagatccatatctgatttttgggcttagcgttataatgtacttgatcaattaattacgactaaagtctttttgattatgtgtggctacgttgtaatcatatggttgatcattgataatcagggcataaatggttctgattagtttatgaattgaagcaatagctatctttttgaaccctttggtttgagaggatagctttttgctttcataataatctgctatatgacacggatttgtcttagctgcattatcaatttgtccaatagctcgataaagcaacttacgtgcgactgcattgccatgtttagtaatacttaaattagagtccatttctcctgactgatatctgcctggatcaattccgataaaagcattgattttattaggattactaaatctgcgtaaatctcctaactctgctaaaactctgacagcagtggtctgtgcaaagcctggaatgctttctaggttttctaaatcatgattaggcaaagacttcgctaacttaaccattcttgcgattaaattttctctttgatcacttaaattaagcaatctgtgtgcataatactgcacttgctcgacttctatgctagagcaagatacaactggataagcttgataagctaattcaattaatttatctgcagtccttagagcgtgtttaaaagcaatcccctttaagctcattaaccagttaataagctgttttttatcttctcttcttactaagtcacaatgaggatatcgcacaactatttgccagtaatttttacctttagcagaagaaaataaattttcaatttcaggaaaagtcgattgtagagcttggtgaagtcgatttttagctattaccaagtcacttgtcagctggtcatagaagcggctcaaagcattaagctgcttataagtttgggattcgctttgattaaccggatggcgataaagtctttgaattaaagctaaatgataagcatcagttttatcggtcttgttgtagcgtagccccatattcatctcttttttggctttaagcggattaataacaacatattcatagccgtagtcttcaagaaaagcctgcagtctgcgtgaataaacaccggtagcttcaaaaataatttgcggatgtttagaaaaagcggttaattcatgaagcaattgaataaaaccaggacgattattagtaatggttagttcatttttgctttcaccaattagttcacaaacagtagaagtagacttgcttacatcaattccaaaagtaacttgcataataaaaacctccaaaacttagtagtaaaacgtatttacttaagaaatcagatctaattttctaaactcgacatctagtgtccacattcttcgaagagactattgaaaacttaagtaaaactgccagtttattatgcgacatcaagtgtctaaagacctcagggcatatcgttttaccactactttaattctacaaaagaataaaaatagtgaatcaattatcccgtcggataactaattcactatttagcttagaatgtttactatgtctaaatttaataaagaacaaaaaatagaaatttatcataaatggaaagatgaaaatatctcaatcagtcaattggctaaagcgtacagaatgaatctagctaatttagactatatgcttagattaattgatatgcatggaatagaaattttaactactaaaaaccaaagctattccaaagagtttaagcagcgaactattgaacaagcaatctttggcaataaaccatacttacagctgtctttggaactggggtttaaaagtattggcatgcttaacaattggattagagaatataagaaaaacgggtataatgtcattatcaaacagaaaggacgccctgcccgtgaccaaagaaaagcagaaatctcgcaagaaactggagaaagagatccagcagctgaaagaagaaaacttgcgattgcgtattgtgaacgaatacgtaaaaaaactaagtgccttggaccaagaagatcagaagaaatagctagggtgattacggatctaaggcaagaattcaaagttagtttaaattatgtattagctgcgattgcagagcaccctgagctacctataattgccagaagctcatactacaagattatcaaacgacagcccgccaagcctaaacggtcaaagcttattgctagaatccatgagatttttaatcatcatcaaggccgctatggatatcgcagagtagctttgcagttaatcagagagggctggaaagttacggagaaaaccgttcgctattggatgcataaattaggtcttaaaggcatcaggcgcaataagcgcaaatattcaagctataaaggtactattggcaaaatagctccaaatttaattcatcgtgatttcttcgcagccctgcctaacacaaaatggtatactgatatcactgaatttcatcttaataatgaaaagctttacttatcgcctattctagacggctgcggtggcgatatagtttcttatactatctccaaacatccagatatggatttagtaatgacaatgcttgacaaggcttttgccaaagaaacagctcttaataactgcatttttcatactgatcagggctgtcagtatcaaagccctcgttatcagcgagctttaaaactccatggtattactcaaagcatgtccagaaagggcaactccatggatgatgggctaatggagaacttctttggcctgctcaaaactgaaatgttctatgatcaagaatacaagtatcataatcttcaagaattaactcaagcaatcgaggaatatatcgaatactataacaacgaaaggataaagagcagattaaaaggcttaaccccgaaagagtatcgaagtcaagcctctattaatccaatattttaattgtctactttttacgtctcagtacaaaaattatagagccggttttttagtactgttttaattctatcatgattgtagtaatgaatgtattccttgattgcttgttctaattcacccatggttttgaatgtcttttcaaagccatagaacatttttcgtttaagaatgccaaagaagccctccattaagccatcatctaatgaatttcctttacgtgacatagactgggaaacaccatgatttttaagccaagcttggaaaacagcgtgctgatattgccagccctgatcagtatgaaaaattaacccattgagtgcaggatgcttttgataagcttgatccagcatgtccattacttgttttagtaccggatgacgatttaatgtataagcaacaatctcttgcgtacatccatccataataggcgacagataaagcttctctccattaaggtgaaattcagtaatatctgagtaccaatgtctatcaggaataattgctttaaaatttcgtttaattaaattgggcttgatttttccaacagtccctttgtagcttgaatatttaaatctgcgtctaattgcaatggcatatagatgcatcttggtcattaatcgtttaacacgtttatgattaactataatgccttcacgtcgcaattgggcagtaattctacgatagccatatctatgcttgtgctcctcaaatatttctttgatccgttccataatcttttcgttttttaaatctttatcatctttagttaaagtgtagtaataattactgcgtgataaatgcggaagatcaggattggagttaatcgtatcaagcacaaacttaacggttacgtggagttcttgccttagttgcgtaaccgcagaaactatctcttgtgctgttggttttcggttcttggggagactaaggcgctcaatttttttacaaattcgttctcgacagtaagtcttaagttcttctgtttgaggtcttttatttgcttctgaagctcttgaatctgtttgtctttgtccttcatgggtaggtctgcctttcttgtgattaatgacattatacccgtcttctttatatttgcgaatccaattgtgaagcataccttggctgggcagtcctaaatccaatgatacctgacgagccgtttcatgatcataaataactcttttgatggctttctctttaaattcaactgagtaatctttatagctattatcaagaatttctatcccatgacgttctattaaggcaatcagataaaacaaatttgtacgatttaccccatattccttagcagctaggttagctgatatattataatttttccaattattgtaaatatcaattttgtcttgtttggataatttagtcataataaaaacctcgaaattcttgtccgaatttcggggttcatatcatttgtttctgtagtgccttttttataaatatcaataaattttaggagtgtaataagattttagaattaattatgttcaactgctgttaacgtaatgactccaattaattcaagtgccaaaaatgtaattccaaggatagtaatcatagtgcccatctccttatctaggagataaataattagaatatttatcttttaattcaatcattgcttacactgttactgtaccacataattgcgtattatgaaagcgattacattaaattgggagaaaaaagttgacctccgaagaaatcaacttgtgcccctgccaaggacctatattatagcattcatttattctgcatgatcatcctttttctcagttgagtcaggattttgatcgtcagacttggtgaagtcaccattcatggtattaggacgaccagtttgataatcaactgtgtgcttttcagccttaggtgcgctttgaccaggttcaggcataaccatagcagcaataatatataaggcaacgccaggaaatacacctgtgaataatatcaatgcagcaccgatgattctaacccaagcaggatctagatcaaagtagttagcaataccgcccaaaacgccagctaaaattttattttgtgattttgtaagtcttttttgcatgataatcaactcgtttctaactgttctatctcttttacatatattatacagcaaaggcatgaaaaaagtgttgattgctcaacacttacacataattatgatgcccgctaaaagattcgaactttcactcagtcacctgaacagcgacctgaacgctgcgcgtctgccaattccgccaagcgggcaattttctttggtacatgaataatcataccaaatatttggtaaaatgtaagcataaaatactttaattataaaaaaggatggaaattcatgttttttagcaaaaaaataaaacgtgcagcaattaccacgattgctgcagtatcaattttttcttgtggtgcggtatttgcaactataccagttagcgcagatacaactagtagctatcaagctgatcaagttaaactaaatgtaaagtcagcaattgcaattgatagtgattcaggtcaaattttgtatgccaaaaatgcgactaaaactttgccaattgcttcgatgactaaattagtaacagtttatttaactctgcaagcaataaaaaatcataagctttcatgggatcagaaagtaaagccaacggctccgatagtaaaggtagctaataatgcagaatattcgaatgtaccattaaaactaggacattcgtatacgataagacaactttatcaagcaaccttaattgaatcagctaatggtgctgctatgctgcttggtcaaacaattgctggctcacaaaaggcatttatcgatcaaatgcgagctcaagtaaaaaagtgggggattgaagatgccaagatttatactgcttgtggtttacctaatggcaatttaggtaaagatgcatatcctggtgtaaataaaaatgctgaaaatacgatgtcagctaaggatatggctattgtcggtcaaaaattaatctcggcattcccagaagtattagaaactacacgcttagctcacttaaactttaaagatgctggtcacgtaactaagatggctaactttaactggatgttaaaggggctttctcaatatgatcaagcttatccagttgatggcttaaagacggggactactgatgctgcaggggcttgttttatcggaactgtacaacacaatggtgctcgtttactgactgtagtaatgggcgcacgtcaccgtgacggaacggatccagctagatttgaacaaactaaaaagttaatgaattatgtttttaccaagtatcgtcctgtaacaatgactgctggtagccaaatgaatggcgctaagacaattaaagttgttgatggtgataatgcaactactaatttaggacttaagcaaaagactactatctgggatccagctgatggcaaaactttagtggcatcattgaataaaaaatctgtagaagcaccaattaagaaagatcaaacagttggtgattatcaatttaaatctggtaatgaaaagattgtttcattgtctaatcctaatgggatgaacgtcaaggctaaggcattgtcagctaataacaaggtgaacttttttgtcagaatttggcgctggattttcggaggaagataaatatgactgaaatttctgaagatatcttgaaaaaggtaattaaagaaagagaaagcgatacacataaaggcgattacggtcgtgtactcttgatcggtggtagtgagaactatggtggcgctattattatgtctaccgaaggcgctattaatgctggcacaggtttgactgctgttgcaacacaccctttgaatttagcaccgttacatgcacgagtgcctgaagcaatgtttatcaactggcgcgatgctaagttagcagatttaatcaaaaatatggatgttgtagtttgcgggccaggattaggcatgagtgatctcgctaagcaaattttagttatcttgcgaagatgtacttcagaaaaacaaaccgttgtcttagatgccagtgctcttgatttaattagtcaggataagaacttattgccaactaatgctggccacttaatcttgacgccgcatcaaatggaatggcaacgattgagtcaaattcgtattccgtttcaaacagatagtgccagtattgatgctttaaaccaattgattccagatactaatgcgcttttagtactcaaatcgaatcatactcatgtttataatgggactggtcaaatttttgttaatccaattggcaatccaggcatggccactggtggaatgggtgatactttagcaggaatcatcggtgggatggttgctcaatttggcccaggcgttgaaaccgttcaagctgctgtctatcttcattctttagcaggtgacttgcttgccaaagataattatgtggtacgaccaacggaactttctaaagtattgcctaaattgatgaaaaagtattcagaattggcataaacatgttaaaattctaatagtaaataaatgcatccctagttgagggatgttttttaacgcttcaaagacgaaaaagcataatataattgagttaaatattaataaaaaagaagattaacatatttatgaaaaaaaacattattatcggcgtaactagtatcgttctagcttttggtgcaattatcggcttagctaaggtatgcgcacctaagtctgatgtctcacaagaagctgctacaacgcagactaaggccaaaactaagaaaataaataaaactaagaaaaaacaaactaaaaaagtagataatggtgctttatatcgaccatatagcgatcctaaggacttgcgcaaggcaggcacttggaagaaaaagagtgagcctaaaaaatatcctaagattaagccatatgaaaaggatttgactttgcgggtatcattaaaaggaaaccggacctatttgttaagaaaaggcaaggttttgtataccatgttatcaactggtggaatctacaagaagggcaagtcattgaccccaactggaacttttaggatccaaaatggtcgtggagacagctttttcaattataacttaggtgaaggagctaataattggactagttggagtcctgataacgtgtacttgttccactctgtgccaactaaagctgattatagctataacttaaaagaagcagtcaaattgggaagaactcaaggttcacatggttgtatccgtttgagtgtacctgattctaagtggattatggatcacatcccagatggtacgaaggtaatcattaaaaataattaacaagaacgttgctttttaagcaacgttttttaaaaaattgcagtaaaaaactttgttcaaagcgttcaagattttaatccaactcaagaatggtttttttaaccaaattagtggcagaagccgttttttcctgctataatcatgtttgccaagaagtcaaaagtagtagttattttctttttaagcgagtctatgttggtgcaagatagatactagaagataatgaaggcgtgtttgactgataaaatcaagaatttaaataagcggatactttgtatcaatctgagtggtaccgcgggtttttaactcgtctctttctacatttgtagaaggagacttttttatttagaagagaggaataagatggactttaagaatgaagtagttgacttggttgctagtcaagttgatttacctaaagaaaaaattgctgcattaattgaacgccctaaaaatgctaagatgggagactatgctttcccagcatttattttggctaagactttgcacaaaaatcctgcagaaattgctaaaaatattgcggataacttatcaagtgataatttcgctaatatccaagcagtcggtccttacgttaactttgcgattgaccatgaaaaattagtttcatcgactttgaaggatgttttgactgaaaaagaacattacggtgatcaaaagattggtgaaggaaatgtgccaattgatatgtctagtcctaacattgctaagccaatgtcaatgggccaccttcgttcaactgtaattggtaattcaattgctaagacaatggagaaggttggctatactcctgttaaaatcaattacttaggtgactatggtactcaatttggtaagttgattgctgcctacaagcactggggtaatgaagaagacgttaaaaaagatccgattatgaatcttttccactactatgtaaagttccaccaagaagctgagaaaaatcccgaacttgataatgaaggtcgtgaatggttcaagaaacttgaagacggggatccagaagcagttaaactatggaaatggttccgtgaggtttcattaaaagacttcaagcgaatttataaagaactaggcgtaacttttgattcatacaatggtgaagctttctttaacgataagatgcaaccagtaattgatgaattaaaagaaaaaggtcttcttcatgaatcacgtggtgcgcaagttgttgacatgggtgaaggtgaaaatcctgctattatcgttaaatctgatggtacttcaatttacttaactcgtgacctcgccgctgctgaatggagaatgaaagaatataacttcgttaagatgctttatgttgtaggtaacgagcaagcccaacactttgttgaattgaagactgttttgaaaaagatgggttatgactgggctgatgaaattcaccacgtaccatttggtttaatcacccaaggtggtaaaaagttatctactagaaaaggtaacgttgtcttcctcgatcaagtattaaaggatgctgtttcacttgctaaaaaacaaattcaagaaaagaatccagatttagcagatcaagatcaagttgctcatgatgttggtgttggtgccgttgtcttccacgatttgaagaatgatcgtttagacaattttgactttgacctagaagaagttgtgcgttttgaaggcgatactggtccttatgttcaatacactaatgctcgggcacaaagcgtcttacgtaaggctgctgcgatgggtgaaaatcctagcgaaactgatctagctcttgatgatgactgggcttttgccgtagccaaagatttagcagatttcccaagaattgtagctagaagtgccgaaaagtttgaaccttcagtaatagctaagtttgccttagatttagctaaaaaattcaataagtactatgctaatgtgaagattttaaccaaggacgataaaattggtgctcgtctcgccttagttcaagcaacatcaatcgttttaacggaatcacttagattgttaggtgtcaatgctcctaaagaaatgtaagagaaaaacaatgaaaataagaaaataacgcttacattctgtgaaaaattgttcatatttcaattattagggtacaataggcatgtaagatatttaggaggtattttttaatggcttattttgacaacggtaatcaaatctttaaagatgctcgtaagaaccattacgctgtaggtgcttacaacactaacaacttggaatggactcgtgcagaattacgtgctgctgaagaaactagaactccattgttgatccaagtatcaactggtgctgctaagtacatgggtggttacaagttcgttaaggacatggtagctgaccaaatggattcaatgaacatctcagttccagttatcttaaacttggaccacggtgactttgaatcagctaaggaatgtatcgctcttggttactcatcagttatgtttgatggtcacaagcttgatactgaagaaaacttagctaagactaaggaaatcatcaagttggctcacgaacgtggtatttcagttgaagctgaaattggtaagatcggtgaaaaccaaggtgctgatggtggtgaattagcatcagttgaagacgctaagagattcgttgctgctggtgttgacaagcttgcttgtggtattggtaacatccacggtgtttacccagaaggctggaagggcttgaactttgaccgtcttaaggaaattgctgaagcagttccaaatgaaccacttgtacttcacggtggttcaggtattcctgaagaccaagttaagaaggctatccaacttggtattgctaaggttaacattaacactgaattccaattggcattccaaaaggctactcgtgaatacatcgaagctggcaaggacttagacaagggtaacaagggttacgacccacgtaagttattgcttccaggtactgaagctattaccgatgctatgaaggaaatgatcggttggttaggtactaagactatcgatgacgaacttaaggatgcttcattcgaccgttcatcattaaacgaagaataatcatttgataattatttaaataaagtctagcgtttgctaggctttatttttttaggcaaatttggtgataacttaattgaacttattataaaagaaatataaaataaaaaattgaattataaagaaagtataaaaagagacttttatggaagcaaaaatgttaaatccatttatgcctaactttggtcgttttcctaaaattattatcgatcagcaagaagctttaactgattatttaactgggttgcaaacacatgatgctaagtatcaaacttctttagtttatgtcacaagaggatcaagaaaaacagttttccttttaaatgttcaaagatctttagaagagttagataattggatatttattcgtttaaataatggtcaaggagatttgctttttcaattaatgcatggtttgcaacgagttgcaggtatttcgttagttgacttgttaaaaagtgttaaaagtttgaatattatgggaaagggaattactgggcaagcactacaagaatcacagcaaattgattatgatgagtatatttcaattttgctaagtcgtttaaaaaagcagggtaagtcaattctaatcggaatagatgaaattgaaattagtgacgatgttcgggcttttggctcagaatatcaaacattgattggtgatgaataagatatttcattattgatgacaggattgccaagcagaatatccgaagtacagaatgaataataccctcacgtttttactatgtagtaatcgtgtttatttatcaccgttggatgaaaaaacaatagctaatagctatgagaaagcatttactaaaggaaaacgtgaaattgatttcatggtattggatgaaatgagccgtgcagttaaaggctatgcttatgcctttcaaacgattggttattatgcttggcgatttagtcgggaattattgcagttaaacgaagaagttttgaaacaaacaattcgagctgcaaaaaaaggacctttttaggaatgcctatgaaagaatgtatatggatctttccaaaactgatcgcgattttatcgaagcaataatcaaagctggaaccgatcgtgtcacgacaaaacaattgcaagatatcttaaacaagcctattaattacatttcggtctatcgtgcaaggctgttagatgatcaattgattacatcccctcaaagaggagtagtacaattggcgttgccattttttgcagagtttgttgaaaaatctaatttagaacatttatcttagaaaatgagcaaatataataaattatggcaatatatcaaagataataaggctggggactttgagctttcttttgatgagcttggccagcaggctggggttgccttagatcattcctttttgcgttataaaaaagaattaccagcttatggctttgaggtgcaaaaaatttcattgaagaataaagtggtgaagtttcatcagttgtaatgaaagctattaataactaaagtagtagtttgcgataatatcttcaaaattagtaactatgttttgttttagaaaaagactaagatgtaagtaaaaaatgggaggattaataagttactatgaagaaggttttatcttggccagtatattatcaactatcagagatttatacggcgccattaaatgtaatttggtttgtctttggcgcggcaatgtcgtttcaacaatatcacatgtttaatttgattaacattttactgtgcttagtagatgtttttctgtttgatttagcagttaatattgctgataattactatgattatcttcatggcaaagatcgacattttttgactgatataaatccaattggtcgtctgaagttacctttaactgatgttagaaacttagtgtggattagttactttatttcggcgattccgggtattattttggtttatcgcaccggctggccagtactaataatgggagttgtaggatatttcattggaatattttacactgcgggtcctaagccactgaatgcaacaccgatctgtgaattagtggtatctttttttatttcgtatttcattatgctagtaagcatctatgtcacaatttacggcacttatcctttgacctggaacttagcattaactactctgataagatgtttgcctttaacactcattttctatgctttgcagttagctaataatacttgtgatttgcatgaagatttaaacaatgggcgccatactttagccagttatactggtaaaaaatatgctcttaaaataattaagacgttgattattgcgggattattatttccaattatcgttgttctttttggtttagcaaaatggccattgatctttagttgttttttgttgccaatattatggccaaaattaaaacaattttttgagcatccggataaacaaactacctatttacaaatgattaagtatttatcaacgcgtggtgctagttaaatcgttctagacaataagccaaattataagctaaaattgcaatttccaaccggctttgaaagcctatcagactacgtgctcgattgttctcggcattgtaataggtcagaagcgaaaagtcgctttcaattgttctgcgaatagccatcaattgatgatcattgtgctttttagctcctgtcatatttttacgatatggtgtccaaagttcataacccatttgttttagctgttgatgcagttctttgcctaaatagccttcgtcgccaagaagatagtaattagatggatgggtattttccagcagttcaactgtctccctggcatcatgaactgatgcttttgttacgacataatcaagaatgtaaccgtcatcgctaacaatgacatgaactttgaaaccatagaagtaaattttcttggtggccttataaccaatgttggcataaccgcgaaaaattttagcacgatagttgcgaattggttggcaaacaggtaccggaaagctgtcaatgatcaagaaatgtccattcaggtcaacctttttattcatttcttgccgtatctgataaatcaattgcaatagctgacgtgaacgtcgattaaaacgtgagtgtgataaacaattgaaacattcacagaatcttctttgtgattcaattcctgtcttagcttgccagataagtaaagccaaaatcagactgtccgtagttttaatttgatcaatatttcgccgatgagtaaactcagccggtgcatacaaacgataccagtgccgacaaattatcactaaatctttaaaactaacttgtaaatggtggctaaaacgcttaagcttaaggcagttcaatcagatcagactcttttctattattactatttacaagtcgagtctaacaagattggacttttttattaactaaaacgatttaactagcaccacgcgtatttatcaatatttttcattacatatatagctatttatacagtttgggttttagtttagaggaaaattatggctttgaatatcatagatagaggattacactcattgataatgaggggggaaaataattatgtttggcaaaaagaaggataagaattcagaattttcaccagatattatgactttaaaaaatgcacttgaggaagtacgttttacgcccgaagttgagcatgacgcagaattaattaacatgtttgacgaagcaattgataaagccgagaagggtgaatctgttcaaacaatttatggtcgactcagttatcaaattacgcaatatattcaaacacatcatttcaaggcacccaagccagtaactgaattcttacatggaagtactggaagcgtagccacgggattgacttcagttccagtttcttggaatacagtacattaggaattttttatgtgcataaaattgacaaatactgaaaaataattgattaattaaacagagtagcaggtaatactactctgtctttttattgcaaatatgatgtcaaatgcgaaactgtaaaatagtttgtgtaaggatgaatatttccttaattttattttcctgaatattagaaaaaggaatccttttcccgtatgattgatttgaacgaaaaacatactagaaaagagattccttcatgaatgattttaccaaagatatggctaatgctctattcaatcaggataaaattaatgatttatttagacaaaagctccaacaggctgtcaatgacctgcttgaatccgaattgactgcctttttaggctacaatccttatgagcgcgatggctggaataccggaaattctagaaatggtgcttattaccgcaaggttgatacgcaattcggacaaatagaaatcaaagttcctagagacagaaacgttgagtttcatcaacacactatgccagattataaaaggcatactgatgttttagagcaaactgttatcaagctctattccaagggcgtcacaacccgagaaatcgctgatttgattgagaaaatgtatggcggctattattctccagctatggtttccaatatttctaaagaaatgattcccaaagttgaggcatatcatcagcgacatctgtcagataagttcttctgcgtttatctcgatgccacctatattcctcttaagcgggtcactcatgagcgcgaagcagtttatatcgccatcggtatcaaacctaatggtcataaagaagtgattgactactgtattgcgcctactgaaaatattgagatttggagcgaaatgctcaaaggcttcaagagtcgcggccttgaacaggtagagctcttcttgtctgacggagtagttggcatgaaagaggctatctgccagtcctatcctaaagcgcattttcaacgctgcttggtacacgtcatgcgtaatatcagtgccaaaatgcgggttgacgatcgaaaaaaagcactggatgaattcaagcagattcatactcagtcaaacaaagaaatggctgtacaggtgctgcatgaattctatcaaaactgggaaaaagcctacaaaaacgtagttagagatcttagacaggttgagcctgatctgttaaccttttacaactatccgccagctattagagcttcaatttactcaactaacatgattgaatcctttaacaacaggcttaagcggaaaaccaagcctaaaacagaatttccaactgagcagtcgcttgacacctttattggagttcaggcaatggattacaatgaccgttactttaacaggattcataaaggatttgggcaagttcgagacaccctagaatcctattttgattaaaagataaataaaaaagtcaatcaacgagagagattatttacacaaacttcttgacagtctccaggattgcattactatagtttatgtaagttatgaataggtagtaagtaacttatgaatttcaagatattcattgatttaatgaggagaacgaaaatgaaaattttcaacaagaaaaacttattattgtcatctgcagttgttgcagggatgctattcacagttggtactaaggctgttcaagctgatacaaccgatagttcacaacaagcaactacaaatactttaaaggtaaatgcaaatactgcagttccagataagaatttgattacgccagtagctagccgtgataatcaaactcttcgtcaagttgcagaagcaaacaacacttcattaagtgtattggaaaagttgaatgataatattgatccagataaaaccattgctaatggcacgccattatatcttccacaaaatgaagatttgtcaggactatttggtatatatcttagatcagatacttcagttccaagctcattaaagagaaaatattatgatagtctttcagcaaaagagagagctgctaagatgtggattattgcacgtgaatctggtggaaattacaatgcaagaaatggtatctatattgggcgttttcaattaacaaatacttatttaaacggaaattatagcaaagcaaatcaagaaaaaacagccttacgatatgttaagggacgttatggttcatggtcggcggctaaaagattttggcaggctcacaactggtattaataaataaaaggaaagtggaaaaattgaaatttcaaaaattagtaactagtgtattattagtagctagtaccactggtgtattaatgactgcacctaaacgggttcaagctgtagctgataccaatactactgagagtggaaaacccgtcgcaaatattgttaataagcctaacctaacaaaacaaggttatgtgttaactattcaagccccatcagggaagatttatgtagggcaaaagaattacaagaaacaattaactactactaagccaatatctaacgcaaaatcagttagttggaagaaaattaaaaacgttagatttagaattgaaaaagttgcttatgcgacaaaggttataaaatttggtggagcaccacagtatctgcttgtctctaaagataaaaaatatagttgctggacaacgcgttattctattaaatactatttttggaatactaaaaagatgcaacaagtaattaagccattgtctaaattgacaactagaaactcttcaagcctaaagaagattcggaataagcaagattttaatcaagctgtattagctgctaaaagattacctgctaatcaaagaaaagttgtcttagaatctttgaatcaagtgaaaaaagttggcaatattgataaggctgaagataatattttgttgttcagcttttagtgatatttctagcacagatttaaaattaatataaaactgaagttagaagaatttatttaatgttgagggggaagaaattgtgagaagtatatctaaaggcattgtatctttgatagcagctacaatgttattagcagcaggggaagggatagttcctaatactgttaatgcttctatgctagattcggctaaaagtagccagaatagtcaagaaagtagtagatacacttggcagagtgttaagctaacagatggaactgaaatgcaaattcttccagataattcttcaaaattagctggaaagattaaatataacggtcaaatatattcatatcgcattgtttcaaataatggtgtatatactatttatttgaataatgaggaagtatattcagttgatataaataatagccagttacctacgacaagtgtaggtggttttgatccatttattaattttacgtacgcaaatggtaaggtagcatttaaacatgcaggtagaaagtattattatttgacgacagagaaatatagtgcagatacggtaagaagactgaaaggaactactaaggatattattattggtttgcttggatttgttcctgtagttggcccctatgtttctgccggcggttttgcctatactgtttataatgatatttttggaaagaatcctaaaaataaatggtatacgataaaagaatattgcactagagggtatgaatattatgcttggaagacctatacttatactgactctcatagaaaacatctacaatctgttaaatgggagtataaaaaagtattatgagaggaattttaactagtagagttgctagaggcatattagcgtttatatttatattttttacgggttggtctgctgcaagattaatagtacagatagaacgttctgaatcgatatatgactaccttattttgggaggatttagtctagttttaggtattttggaactctatagattaataaatagtaagtaacctgaaaattttagaaaattgaacgttaacgtgaatatcaatataacacgcttagcttaaatagtcttattagtttttataattcagtaagataatcggcaaattggtaatatttagttgtagtcgcttcaaaggataaaaagtattcaacttggattactcaagctttcttgcaatactactacctaaacagcaagtctatgcaaggtgtgattaagccactcaagcgaattgctaatagattaaataccagtctgaagaaggcaaacaacaaacgtgactttaacgctgcaatgaaagctgctaagaagttacgtggcagtcaaagagattttgttttacgttcattgaatcaacttaagaaggatggctccatgaatgtagaaggaaagaacttgttattgtttggcttataaaattaagatattaagtagtaaagctcagcagaattgcttgagctttatttttttgtgaacggcagtcgacaaacagtataatgaacttatatcaaaagcactgaagttatttagaaaagaagatggaaaatggctaaaaaagttacgccacgcttggtattagcgattttgtcggcagggatgctctcatttttaggaatattggatgaaacggccacgacagttacttttccaacgttaattaaagaattttcgattactactgatcaagttcaatgggtaaacacactagtcttattggtaattgcgaccattgtgccaattagctcacagattagattaagaatttcgactaagaaaatttttattctaggagttcttttgtttactttggggctaatcatcgatattttatcaccgcgctttgatttattgttattaggacgggcaatgcaaggagtcggcacggggattggcttaccgttaatgtacaatattatcttggctgaagtacctaaagaaaaactaggctttatgatgggaatcggcactatgattactgcctgtgccgttgccttagggccagtttttggcggaatgattaccgatgcacttaattggcgctggatcttcattatttcgctatttttaatgaaaaacgcccggaaattccccgtattttaatgcggggatggatagggccaagctgacctaatggtcagctttttttattaaaaaatgaagacatatgttcgactttcctgtaaaatataaatatctaatctacagaaggaggtgaaacacatgaagagaatgagcagtttagcctaccattttggcttgaaagtacgcttttatcctagttctaaacaaaagaaaatcatcaagctaaattatgatgctcagcgttttgtctacaactcttatgtaggacgtaatcggaacaattatcgggctaagggctacttagctgttagacaatatcaagtaatgccttttgccttttctgttcttaataattatgagactaagctagcagaagaagtagtcgccaataatgagttattggctaagccaaagaacattcgcgatgcctatagctttttacgcgttaaagaaattgacagtctcgctattgccaatgcgattcaaaactatcagaaagcttggaacaactatcgcaagcttggtcatggaattccgacttttcacaaaaaacgtagtgattggtcatatcagaccaactgtcagtatcctaaacagacagaagcctttcttgataacgggacagctagatttattgatgctaagcacgttaaattgcctaagctaggcgttgtccgcattgccagctttagaaaattgattaaagagcgtttgcttaatcatatcccaactagaattggcacagtcacgattaaaaagaccgctgacgaccagttttacttatcaatgcaactaggcagcgatattgcctttgttaaggaattgcctaagacgcagagtcaaattggcatcgacctcaatcttgataatttcttaacagcatctaacggagcaatggtggctaatccacgattttatcgcaaaaccaaaaagaagcttgcccatgcccaacgtgtcttgtctcgcaggcagcgcagagctaagaaagagggacgcaatttgcgcttagccaagaattatcaaaaacagcgtctagcagtcgctaaactgcacgataagattcgcagacagcgaaatgacttcttgcaagtactctcaactgcactaatcaaaaaccacgatttagtagttgccgaggaattaagaagcaagaacctgttaaagaatcatgccttgtctcaagctatttctgatgttggctggcgcagttttctgaacatgctggcatataaggcagacctatatggcaaagagttcaaaacaattgatcctaagtacaccacccaaagatgccatcaatgtggcagtattatgggacaaaacggttataagaaattaacgcttaaggatcgagaatggacttgtccaatctgtcaaacgcatcatatccgtgattggaatgcggcagtaaacatcttagaaaaaggcttaggcaactggcagaattctaaaataaaaaaagcagcctaagctaggctgcagtccgctcgcaactcgcggactcaaaaggctttggtaattagacgacctctatcggcaatagtcaaaagattattgttggtaagtcaagtccgtatctaagcaagttggtgttctggttagcgcaagctaacgagccagccaccaagccccagaatttattctggggtagttgacttatcttgagtctatttacgggaagctattcaattcggcagattaatccgcttgaaaaagtgaagttcaagtatgtgcaatggctatctttggctattgggctggtctgtttaatgctgggctttacacggattgctaaacattcatttttctcaattcaagttttgggcttcttaattctaggaattattagtttattaatttggctaaaaatatcttggtctgataaggcggctttgattagtccgaaactgtttaaaaatttacgctttagtatgcagctaatagcttattgttttgccaaaattgcaacgctagctttgggcttcatctttccaatctatgttcaggctgtcaatcatggttctgtttcattagcaggctgggttactttccctggtgcggtaattaacgcgctaatggcggctgtagcgggaaagctgtttgataaaaagggtgcgcggctgccgattattatggggataatcgctagtttgattttgatgaatgttttagccccattaagcaacctggcaattgtcttgttatacgttctttattatggcggatacgggatgtgctttggcagtttgatgaccagcggtttgatcactttaggcaaagaaaatcatgcacaaggtaatgcgatttttaatactttgcagcaattttcaggtgctttaggaacagctttagctgagaccttgattgcgctagcgcagaataaatatctgactaatggcacagcagtcggttctaagtggacatttatggtattactgattttgataattattaatttgctcttggctcttgcctttgtgccgaagaagaaatgaagggaagttcagcgaaagctggacttttttaatttaaaaatatactaactctaaatacgcaatatttgcttaatatattaaacaaaattataattattttgattaatataaattacataggagcaaaacatgaatccagatttacttgcggcacttattcttgaaggtcagaataatattaaaaatattgctattattcctcgtgattatcattttgaaaatagtttaaattatgtgttagtaggtttgcggcgggctggcaaatcaacgctattatttaaaagggcgcaggatttagtgaataaacaaaatgtggattggtcacaaattgtttacttaaattttgaagatgaacgattagatggttttcagttggctgattgtaataatatcttaattgcagccaatcaattaacaactaagaagcattattttttatttgatgaaattcaaaatattgctggctgggaaaaatttgctcgtcgtttagcagatcaaggtgaaagtgtttatttaaccggtagtaactctaaggtgttgggtcatgatattgttctgcggctgggtggaagatatatgaccaaatatgtggcaccttttagttttacagaatatttaactgctaaaaaaattccacatgataaattatccgtcttggatacagttaataatggccaaattcgtgctgccgcaaatgaatatctatgttatggtgggttgccagaatctattatcttaacagacaagagaaattacttaacaagtatttatcaaaatgtatttttagctgatatcattgtccgcaataagattcgtaatgaaaagacgatttcattattacttagaaaaattgccgatacagtaatgcaccaagtttcagaaactgtcaaatcttttgtgtaaatagttctttctcgtaaattgattttttaattatttatttaatcaaagtaggattctaaggtgtcctgaacctgaccaaagcctttatgaattcgattgaaataacggtcattgtagctcattgcctgaataccaataaaagcatcaagcgactgttcagttggaaactctgccttaggcttagctttgcgcttgatcacattgttaaatgattcaatcatgttagtcgaataaattgaagctctgatctgcttgggatagttataaaagaccagcagatctggttctatgtctttcaagcttctgataacatggctgtaaaccttgccccatttggtatagaagtcatgcaggacagctgtggcttcttctttgtttgtctgttgatgcacctgtttgaattcgttcatgatcttttcacgatcgtcgacgcgtactttagcgcagatattgcgcatgacatgaaccaaacagcgttgaaaatgagctttaggataagtcctggccaaggctgttttcatgccaacaacaccatcagaaagaaagagttcaacttgcttcaagcctctggacttcatgttttgaagcatctctgtccagacttcaatgttctcactaggagcaatgcagtagtcaatgacttccttatgtccattaggtttaatgccaatggcaatatagactgcttcacgctcaaacgtttctcggcgcaaaggaaggtatgtcgcatccaaatagacgcagaaaaacttgtcgcttagcttgcgtttgtggtaagcctcaacctttggaatcatctgcttggaaatatttgatacctgagctggactgtaatggctgccatacatcttttcaattagatcggctatttccctggtggtcacgcccttggagtaaagcttgataatcatgctttccaagatatccgagtgctgcttgtagtcaggcagcgtgtgctgatgaaattgaccgttgcgatcccgaggcacttgcacttcaattgggccaaattgcgtatcaactttgcggaaataagcaccatttctagagttgccagtattccagccatttctggcatagggatcatagcccagaaaggcagtcaattcagcttctagcaagttattaacagcctgttgtagttctttgcgcaataaatcatttattttgtctggattgaatagagcttgagcaaaatctttggtaaaatcattcatgaaggagttcttctttctgtatgtgttttttttgttcaaaccaatcatacgagaaaggaactcctttttctaatgtttaaagaaataaatttaaggaatcattcatccttacacaaactattttacagtctcaagtttcatatgcaactttgtataaaaatataaaaaatgtgattagtacggtaagtcgcaattcgattattgattatatcgattacgctaaggatgcatatttgttattttccaccaaaaattattttgctaaatttagtgagcgtgaaagcagcccaaagtattattttacagataatggcattttaaatttgttttatctggataaattgccagcattactagaaaatctagttgcgatcaagttgcataataaatatcaagagaatttattttatttaaaatctcaaaagacagggatagatattgatttttatgtaccagctagtaaaattgcaattcaagttgcatgggaagtaaatgatacgtcaaaagaacgtgaagttgggaacctaattaaattagctgataattttgatgaagttgaaaacttaataatcgttactcatggtgaagaggctgaaattcagcaagaagataagataattcagttaatgccactatataaatttttattaatgagatagtttttcgataactcataaaatggtaatgctcaaaattttttgagcattttttataactataagatctaaagagatataaaaatggacataagatctaaagagatataaaattaaagccaacaactaaaataatgaaaataggtgaacatcaattatgtctgaaataacgaatccatttgaccctaactttggcaaagttcccaaaatatatttggggcgacaaaaaatagtagaagatatagtaagatcacttgaaagtggcaccggaccctatcaaacttcaatgatctatgggatgcgcggggttggtaaaacttcattacttgctgatattacctcaactttagaacaaaaagataactggattgttatttacttagccatgacaaatgatttgcttgccacgctcatccaaagtatttatcaagaagcagcgaatccagtaaaaaaggcgttgaacaaaattgatggtgtaaagttttcggcttttggctttgaattggaagttcatatatcaaatcctcaatctacttatcaagtgttacttgaagaaatgttaaaagttttaaaaaagcatcaccaatctttattgatagcaatagatgaggttaaagaaactcctgagattgttaatttggcgtctatctatcaaattatggtgttaaaaaagtattcaattaatatgatgatgactgggctgcctaagaatgtttctgaactccaaaataatgatgtattaacatttcttttaagaagcggtcgtgtaccattaggaccacttgatcttttcgatattaagtatcggtatcaaaaagcatttgaaagaggtaataaagagattaataatactgccttaatgaaaatgactaagctgactagaggttacgcttatgcatttcaagacttgggatatcatgtttggcaacattctactgatcaggtaacagatgaaagtattgaaaattcgatctcatcgtttaaaaatgatctgtttcgtaatgcttatatcaagattatctctgaattatcgccagtcgatcgaaaatttttattcatcatggctcataatgataaaaatgttgttaatataagtgatattcgcaagcaaatgggaaaaagttctaattatatttcgcaatatcggcagcgattaatggatagtcaggtaatcattgatgcaggatatggcaaagtggcattttctctgccattcatgaaagactttttgttagaagcagaagaattatatgaaattgataattaacgaaaaaagctgctaattaaactcttcgctttcgtccaccaaacgtgtaagcaataagccgaagtgaatgacaagatccaggttaacagcaagattccaaagaaagttaagaatgggtggtaaatggcgtgatattgcatgttaagaccgcgccaaactaattgattccagaagacattggataaatatgcgcgataagcataagtagccaagaaatggaatacttttaaactggtttgcgaattttttctaacttgatgcaggcaaaaagctgaaatcagtgcaattactgctaaacaataaagagtcattgacggcttgtaatatggtgcattattgaagttgattggataaccgaacttgtgcaactcaacattagtccaaatgaagcaagcaataaataatatggtaattacccaccaaaacttagtgaccagctggttgtaataaccacgcaatcgccatgctaagacaccatacacaccatagatgaagaatgaaataaaaatgcggtcgagtaaataccagtcatgttcgtgcatgccatggaagacattgtaatcatagaaccaaagccagacaaaatagagtacgaaagtgattactgcaatccaaatacctcgagttagattgtgtcctacatagcggcttaatccccagaaaagcggcattaaaatgatgaattgcaacatcatcgtgttataccacaagtgcggggcggcgttcccattaatgaattgccagcagaatgaaccaagattgttaaaatggttaacttgttgcagccatggcatccctactaggtagattaacgtccaccaaatagtaggtacaaaaagattagaccaatttgtctgcatatgttttgcataagaaaaactatttttttcattattagtacggattgtggtatacaaaataccaaaaataaaagctggagccgtatatttgactaaattataaaaaacgccaaaaacatcttgtgtgtgaaccggttgttctacgtccatgaccagcgacataattggctgtgagattactgcgctgcaggcgaatacttttaaataatcgccaatatcagctatttgatagcttttaaattgatctgttttcatgaacttgctctcttcttttcctaatattattgtgtcatttttttaaattaggcgaaaggataatcatgttaaaattagtttagctattttggaaatggggtcaaaatgtcagtagaaaagatcacacaaaacgcactaaaagcattgctttatgaagtagttaccaatcctaagccaggtttagtggatccagttgacgtggggtctcatcctgatatgaatgtgtatttgtttattaatagcagtttgagtttagaaaattattttcggcaagcagctaaaattggagcagattttacggggcaggatttgcggcaaatgtttgaacaattgcgtcaagctggcattgaggcagaaaaagcaatgtttaagacaacgcataatataaatacccataaaggcgcgattttttcgttagggttgtttggctgtgcaagtagctattgtgaaaataataatcaaggtgaatttgaagtgatccagcagatgactaagggcttagtaaagcacgatttaggcaagaggaatgagactgctggagaaaaacaatttttgcaatatggtaaaggtggagttagagcagaagcagaagctggttatcctttggtgagggatgtagcactgccatttttagctcaaaccgaaggtgatttgaatgttcgtttactcgatacgttgatgaaaatagttagtgcgattgaagactcgaatttaataaaaagagcgggaaatattgaggttgtttcttgggcacataatcaagcaaaaaaatatttggcattaggtggctacggtactcaagctggtaaacagtttatgttagaactaaatcagatttttaaagagaaaaattatagccttggtggcagtgcagatttattgattattacaatttttatggcgttgcagcgtgggattatttaacgcaaaaattgtctagttaagaactagacagtttttttgctgtgtgtcgggcatggcatttgtttagtctagtgaaagtctagatcacgggtagttgtcgccaagtgtagcgaaccacaagccgttagcggtgacgctatgggtgaaggaagtggctagcgagttttccgagcctacgtacagaaacctggtcaggccaaatggtggatgagactgcagcacaagttaaagtccaaaggacaaccgtaaaaccaagacggtaaaccagggggcagtggaaaattaaagatgaatgtcttaccccgagagatctcgtggacaggtgaaaccgagtaagctttaatatcagcgatcgtaagcctggtcgaaaaaggttaatcgcgagaagtcagctgaggtcgtagtagtgctgtaatgaaactggagcgaagggcctaatgtttgtaagagcatatctcgctataagcaatgttcagacagtccggataagaggatagcctagcacaaagagaacgtaactctttgatggtgaaagcaattgggacaattctgaataaatttacaagtagaaatggagatatcacgagatggaactaattgaacagattttaagtcaaaacaatctcaaggaagcaatcaggagagtcaaaatcaataagggagcgcctggtgtagacaggagaacagttgatgagcttgatagctattttaaaaagcatcaagtagaaataaaggacgccatcatgaagatgaagtatcgtccgcaagctgttcgcagagtctacattcctaaagctaatggtaagaaacgtcctttaggaatacccacggttgttgaccgagtaatccagcaggctattgcccaagtattaatgaagatctatgatcctcattttagtgagcatagctatggctttagacctggacgcagtgctcatgacgctattgaacaagtcttggaatatttaaacgaaggctatcaatgggttgttgacctggatattgagaaatactttgacacggtaaatcatgataaattaatttcaataattagagagcaagtaaatgacaaaaccaccctccatttaattcgagcctttcttaaagctggagtaatggaagatggttgggttaagcctaataaactaggtgtaccacaaggcggccctctttcaccaattctatccaatatctatttagataaaatggataaagaattggaacaaagaggcctgcgctttgtccgctatgccgatgactgcaatatctttgtcaaaagcggtaaatcagccaaacgtgtgatgaattcaatttcatcatggctagaaagaaagctattcctaaaggtcaacgcaaccaaaaccaaagttgtacgaccaaccaagagcaactttcttggctttaccttctggaaaagtggcgaatactggcaagcaaagccaggagatgaccgcaaaatcaagctttatgacaagatgagagaacttctctgtcgcagaaaagcagctgctcagcctctatcactagtctttactaagataaatcaagtagttagaggctgggtcaattactttagagttggcgacatgaaatattttctaattaagttcagtcaatggctgcgtcataaagtacgggtggtaatcattaaacaatggaaactaccaaaacgaatatacattaacttaatgcggattaacaaggcactaaagtgcaattttagtgatgaagatattcataaagtagctaatacgcgcttaggttggtataaaagaagtacgggtcatgtcattaactttctgcttagcccaaaagtattgggcataagcaaagcggatcgcccaggcttggtcgatccgctagaatattatttatctcgtaaataatcacaaacgtagcgccggatacggaaccgtacgtccggtgcaatgagaggggcgagttataaaactccctctactctattttagatttaaagagatttaaaatgaaaaatccttttaatccgacttttggagatataccacaaatttttttaaaagataattcggataatgaaactaaaaatgtagattcaattttctatttaggtttagataccgagtattgaaaaagcattaagctattgcagatagcttaatgctttttttactatttgattagatctcttataatccaaatgcaattttgtataataatgcaccacagattccacctgcaattggtgcaaccactggtacccaactgtaatcccagtgggctgaacctttgtgtggcaaaggacataaagcataaacaattcttggacctagatctctagctggattcaaagctggtccagttggcccaccaactgccataactaaagcagtaattaagaaaccaaccccgatgttagcaatgtcttcagattgcttgaagaacatgccacgatataaaccaactgcgatgaaaagcaaaatagcagtgccaaagaattcggtaataaaaccgttgaacttactgttagccgaatcaccagtcgcaaaactggcaaaaacagcatcatcactagtggttctgccaatgtaaggccagtagacggctactaagattagttgtcccacgatggcaccaagcatttgtaccaagatgtaaggcattacttgatcccatgggaagacgcctgaacaagcctgagctaaggtaacagcagggtttaagtggttccctgaaattgaacccaagagcatggctgggagcattactccaaacccaaaaccgaaggcgatcaagagccacccaccattggcttgaccgtcacggctattaccaccggtatcacgtagtacagaattggcaactgatccgttacctaaaacaactaaaataatcgtaccgaaaaattcggcaaaatacttcattaaccaagtatgttccataatagatactttcttctcctttagtagaaaaaataagtgaaaaatagtacaaccaaaaattatactcttaactcgaaaaatagatatagttttttgtaaaaaagcaagaaaatagcattaaaaaacactaacttttaaattaattaaaaagatttactatttggctgcaatcatcacaattttataattatccagcaactcaataaattagaccgttccaaatatgaacattatttaacaagccctagataatgccaaatctacttttgacaaataaatgcataatcattatattaatttcacaaatttggtatatagctttatatatacttaatatataactttaagcgctttcaaaatattgtggtactatacagttgttcacaattaatatgcataaaaggaaagagagtagcagttaatgagaacaatatatttggtgcgacatgggcaaactttgttcaatgtgcatcataaaatacaaggtacttgtgattctcctctgacggaattagggaaagcgcaggcgacagcggtgcggaagtattttttgcaaaaagaaattagttttgatgccgcattttgctcaaagcaggaaagggcaagcgatactttagaaattataactgataatcaattgtcttatacgcgactgcgtgacctgcatgaaaaatctcatggtgaatatgaaggacaagatgaattcatgttgccatggcgacgtggctttagccgtattaatgccgcaatggagccggatcaacatgttgaagaaagaatggaacgagcgatcactaaaatcattgattcaacccatgccaacgatacaattttgattgttggacatgggacggctttaaggttatttacgcagcgagtaaatccaacttttaaagaatatgataattgcgggatagtaaaaatgtctgctgttgataataacttgaaatatttaagttatgtagcacccgctaaagatgggttttgagactgtaaaatagtttgtgtaaggatgaatgattccttaaatttatttctttaaacattagaaaaaggagttcctttctcgtatgattggtttgaacaaaaaaaacacatacagaaagaagaactccttcatgaatgattttaccaaagattttgctcaagctctattcaatccagacaaaataaatgatttattgcgcaaagaactacaacaggctgttaataacttgctagaagctgaattgactgcctttctgggctatgatccctatgccagaaatggctggaatactggcaactctagaaatggtgcttatttccgcaaagttgatacgcaatttggcccaattgaagtgcaagtgcctcgggatcgcaacggtcaatttcatcagcacacgctgcctgactacaagcagcactcggatatcttggaaagcatgattatcaagctttactccaagggcgtgaccaccagggaaatagccgatctaattgaaaagatgtatggcagccattacagtccagctcaggtatcaaatatttccaagcagatgattccaaaggttgaggcttaccacaaacgcaagctaagcgacaagtttttctgcgtctatttggatgcgacataccttcctttgcgccgagaaacgtttgagcgtgaagcagtctatattgccattggcattaaacctaatggacataaggaagtcattgactactgcattgctcctagtgagaacattgaagtctggacagagatgcttcaaaacatgaagtccagaggcttgaagcaagttgaactctttctttctgatggtgttgttggcatgaaaacagccttggccaggacttatcctaaagctcattttcaacgctgtttggttcatgtcatgcgcaatatctgcgctaaagtacgcgtcgacgatcgtgaaaagatcatgaacgaattcaaacaggtgcatcaacagacaaacaaagaagaagccacagctgtcctgcatgacttctataccaaatggggcaaggtttacagccatgttatcagaagcttgaaagacatagaaccagatctgctggtcttttataactatcccaagcagatcagagcttcaatttattcgactaacatgattgaatcatttaacaatgtgatcaagcgcaaagctaagcctaaggcagagtttccaactgaacagtcgcttgatgcttttattggtattcaggcaatgagctacaatgaccgttatttcaatcgaattcataaaggctttggtcaggttcaggacaccttagaatcctactttgattaaataaataattaaaaaatcaatttacgagaaagaactatttacacaaaagatttgacagtttcgtggttttaaataaagcagctaaaaatgaaatgttagttgtgcgttaacgaaaagagaacaagcatgaatagagataattatattttgtggtttgatcaattgcatcgcgatgatgttgatttagtcggtggtaagtcatcctcattaggtgagttgacttctgaaacgaatgtcccggttccgtatggttttgcgactactgccatagcttatcgccactttatgaattattctgatttaaatcaaaaaattgataaattattggccactttaactgatccagaagattctgagcaattgcatcgaatttgcaccaaaattagaaaattaattatagaagcgccgatgccaaatgatttagccttagaaattagctgtgcttacgatagcttagcccaaaagatgcaccaaaatgagccattcgttgctgtacgttctagtgcaactgccgaagacctgcctgatgctagttttgctggcgaacaagatacttatttaaatattcatggtcgtgagaatgttttgaaaaaggtgcaagaatgttacgcttctcttttcaccgaccgggcaacttattaccgaattaaacaaaactttccacaagaaaaagttgctttatcagctgcgattcaaatgatggccttttctaaagcagctggtgtgatgtttacggtcaatgtagcaactggtgatgacactaaggttatgattgaggcctcttggggactaggcgaatacgtggtgtctggaactgttacacccgataactatgtagttgataaaaatacgatgaagattgtacacaaaatggtgactaaaaagccaattgagttgatcagattgccatcgggaggaacaattgaacaaaaggtagcaccagatcaagtgaataagcctgctttgactgatgcgcaaatcattgaattagctggttatgctaaagaaattgaaaaacattatggctgctacatggatatggagtggtcacttgatcaaaatgataagttgtggttagttcaagcacgcccagaaactgtttggtcacaaaagaaaaagcaggagaaaaccgatgcaccacaagaagcaactacagaacaccgagtattgttaaaaggcttgccagcttcacctggttttgtctcaggcaaggtacatattattgatgatccaaaagatatcaatgaatttaagcagggcgaggttttggtcactctaatgacgtcgcctgattgggtgccagcaatgaaaaaggcggccgcaattattaccaataatggtggaatgacctgtcatgctgcaattgtatcacgtgaaatgcagataccttgtttagttggaacaactagccgtggacaagctgctacgaaaactttgaaaaacggcgagactgtcaccgtcgatgctaaaaatggtgtggtttatgctggagttgttaaagacgcggttaaaaaagtcgatgaaaagccagctgagcctgctgcagttgaatatttcccaccaactgcaaccagagtcatgatgaacttaggagatcctgatcttgctgaaaaatatgcatctttgccagctgatgggattggtttaatgcgcgaagaatttttatggacgacttatattcaccagcatcccctttatttgattgaaactggtcatccagagagggtagttaacgagctagctaatggaatcggtaaagtcgcgcgggcaatggcaccacggccagtagttttacgtttttcagactttaagtctggcgaatatcgcaacttaaagggcggcgacaaatatgagccgcatgaaccagcagacctattaggctggcgcggtgcttctagatattatgatccaaaatatattaatgcttttaaattggaacttgaagcggtaaaaaaggtgcgcgatgagttcggattaaagaatttacatgtgatgattccattttgccgaacagtggatgaagcgcgcaaagtgacggaaatcatgcggacacaaggtttagttagaagcgcagacttcaaggtttacatgatggctgaaattccagctaatattattttggcggaccagttcaatcaatttattgatggttattcaattggttcaaatgacctaacgatgcttttactggggtgcgatcggaataatgatgtgattgctgatctttttgatgaaagaaatcttgccgtcaaaagggcgattaggcacttgataaaggttgctcatcaagatggtaagacggtttcgatttgtggtcaagcaccatcagaatatccagaatttactgaatttctagtcagaagtggcattgattttgtatcagttaaccctgacatggtgaaggcgactaagctaaatgtagctcattatgagcagaggatcctccttgatcatacaactggcttaggtaaaaaggatccaaatgaatataattggtaaaatacgcgtggtgctagttaaatcgttttagttaataaaaaagtccaatcttgttagactcgacttgtaaatagtaataatagaaaagagtctgatctgattgaactgccttaagcttaagcgttttagccaccatttacaagttagttttaaagatttagtgataatttgtcggcactggtatcgtttgtatgcaccggctgagtttactcatcggcgaaatattgatcaaattaaaactacggacagtctgattttggctttacttatctggcaagctaagacaggaattgaatcacaaagaagattctgtgaatgtttcaattgtttatcacactcacgttttaatcggcgttcacgtcagctattgcaattgatttatcagatacggcaagaaatgaataaaaaggttgacatgaatggacatttcttgatcattgacagctttccggtacctgtttgccaaccaattcgcaactatcgtgctaaaatttttcgcggttatgccaacattggttataaggccaccaagaaaatttacttctatggtttcaaagttcatgccattgttagcgatgacggttacattcttgattatgtcgtaacaaaggcatcagttcatgatgccagggagacagttgaactgatagaaaatacccatccatctaattactatcttcttggcgacgaaggctatttaggcaaagaactgcatcaacagctaaaacaaatgggttacgaactttggacaccatatcgtaaaaatatgacaggagctaaaaagcacaatgatcatcaattgatggctattcgcagaacaattgaaagcgacttttcgcttctgacctattacaatgccgagaacaatcgagcacgtagtctgataggctttcaaagccggttggaaattgcaattttagcttataatttggcttattgtctagaacgatttaactagcaccacgcgtggtaaaatttataatttgatgaaaagtctttgattgcagtattgcagtcaaaggcttttttagagttcaattttgtttttgggcaattttacatttaatttagtaaaagagtaaggttgaactaatgaaatttcgtaagcatctaaggctaatctctcactggcaaaatcagggttatataaaggatcgcctacaataggacttcctaaagaggcaaggtgaacgcgaatctggtgtgtacgaccagtttcaagcgtcaatttgacaatcgcagtattgtcatcatttttttgtaaaacttgataatgagtaactgctcttaatccagtaggatcgattttgcgtttgcgttgatcaagtggatcgtgaccaattggggcattaatcgtacctctttcagctaagtgatcagcattgataactttagctaaataatcgcgatgaaaaattttgctggttaattcacgatttaaaataggtacaactgcaggatttttagcaattaaaagtaaaccaccagttaacatatctaatcgatgaacaatatagggactctgaccaagataagtagtacaatcgttcagagcagtattagtttcatttagattagggtgcgttttttgcccttttttcttattaataattaaaagattatcatcttcatagataacatcgggcatcttaccgcttggtgcataagcctgttgatcactttcaacatgatccaagttaatttcaattttatcaccaggtaaaatgttttgattaaaatagcgatagttgccgttaactaaaatattttgttcaattcgcaaaaaatgacgccacttgcgagggattaaaagttgacgtagtacttcattgacagatgccggagcaagattttctgggtaaaaaagtgtaaaacggaaactcataataatttcttaagtctaatctagttataaacacgtgttttgatagtatggtacaattttcttgtttctaaaaaggagcaatatttaatgaataacgaccaaccaagaagaggtggctttaaagatgcttggcatcgatttgatagtcgcttctttatcggacgctggattattttaatcctgctcacattgatgctcttaacttgtacctattatacaattaaagttaagacatcaaacatagctaatttgaaggcttcgctttcaaccacaactacaatctatgactacaagggtaaaaaagcaggttctttatactcgcaaaagggatcatttgtggaatatgaccagatttcgcctaatattcaaaatgccgtaatttcgactgaagatcggactttttggaagaacccaggttttagtattaaaggcatggcgcgagctactttaagtttagtgattcatcacggtcaagtaactggtggtggttcgaccttaactcagcagttagccaagaactcgcttttgacccagcagcagactttttcaagaaaattggaagaactcttttttgcaattgaaattaaccatgtttactccaaaaaagatattttaacgatgtacttgaataatgcttactttggtaacggagtttggggcgtgcaagatgcaagtcgtcgctattttggcaaaaacgcaagtgaacttaatccgagtgaagccgcaactttagctggaattttacgaaatcctagtttttataatccggttgatcacatgtcaaatgctttagcaagacgaaatttaatcttaaacttgatggtggataataataagttgacagcggctcaagctaaaatgtatcaaaagcaaggattaactttgcggaatacttttcaaaataaaaacggctatcgctatccttacttctttgatgctgtagttgacgaggcaatctctaaatatggcttaactgaagaacaagtcatgaataaggggcttaaaatttatactactttaaatcaaaattatcagggtaaattgcaggatacttttgagcaaagctggcttttcccacaaaatggtagtgatggaactgaaagccaaggcgctagcgtggcaatggacccaagtactggtgctgttcgggcaatcatcggtggtcgcggtaagcacgtcttccggggttacaatcatgcaacgcagatgaagcggcagccagggtcatcaatcaagccgttggcagtatatgccccagctttacaaaatggctatcactatgactcgcaactatcgaacaagttgcagaaatttggtaaaaatggctatgaaccgcataatgtggacaatggctattctaatacaattccaatgtatgaagctttagaacaaagtaaaaatgtgccagctgtttggctattggataagattggtgtaagtaaaggcgtgcaatctgttgaaaactttggaattaaggtaccaaagagtgaccgtaatttagcgcttgccttaggtggattatcttcaggcgtttcgccaattcagatggcacgtgcatattcagcttttgccaacaaaggtaatttgcctaataattctttctttattaccaaaattactgatgcttcgggtaacgttttagccgaaaataataatccaagcagccaccgcgttatttctgaaaatactgctaaagaaatgacgactatgatgctcggcgttttcactaatggtacaggacgctctgctcagccaaatggcttccgtgtagctgggaagactgggtcaactgaagtacctaactcatatggatttggtaccaaggaccagtggatcgtcggttatacgcctgacattgtacttgctacctgggttggttttgaccacactaacaagcaacactacatgcagggcatttctgaaacaggaattacgcgtttatataaggctgagatggaaggaattttgccgtacaccgcgcaaactgaattcacggagaaggcacctaaccagattgtgaagaataatggttctaatgatgactggactaatggattaggtgaaaaaattcaagatggactcggttctgcaggacagaaaatcaatgaatggtataatagccttaaaggcttatttggccaataaaatttaggaggactagatggttaacatttacgatgctgctaacaagttagcagaagatttgactcaaactgatcaatacaagaagttgcaagaagcaattaaagctgttgaagatgataaggatgcttcagctttattcaaaaagatggatgaattgcaaaataagatcatgcaagcacaacaagctggtcaaccactttcagctgaagatcaacaagcttacaaggacttaaatgatcaagttcaaaagaatgataaaattgtttcacttcttacgaatgaacaggggttgtacgatttgcttggtgaagtacaaaaagcttacactaagccaattaatgatctttatgaagatcttagaaattaatattcgcgatgaaatttattcactttgcggatgcgcacttagatagtccatttcgtgggctatcttttttgccatctgaggaatttaaccatatctatcaagcagctgatcaatcattaactaaaattgttgatctggccttgcaagaaaatgtcgatttagttttaattgctggtgatacttttgatagtaatacgccatcaccacgagctcagctattttttgccaagcaaattaagcgattaactgaccaaaaaattcaggtagtgatgatttttggtaatcatgaccacatgaagcaagaagatctgctagttagtcccagtccttactttaaattgttaggcaataatgaaacagtagagcaagctacttttactacggatgcgggttttaactatgacgtaatcggcttttcatatctgaataaccatatcactgaggataaaatcccagaattcccagcaaaaggaaaaaattatacttttggtttaatgcatgctcaagagaaatcagctactgctagtcagaatgtgtatgcaccgtttacagttgatgagttgcaaaacttgaattatgactattttgctttgggtcatattcatgcgagaaataatttaagtagtacgccgtggattgtttatccaggtaacattcaaggtcgccacattaatgagatgggagccaagggatgctatctaggtgagattgatgaaaatagtggtaagactactattgattttaaagaaacagggccaattttatggcaagggacaaaaattaatcttgaaggagctatcagtaaagctgacttacaagcgaaaattattgccaagcttgaatctggacaaaaaacgtactttagtttgacgattgctggtgctcaatatttgagtgccgaagaacgcgatttagttcaggatcttgatttttggcaaactatttctcaatcgctgccatttgcttctcagttagttgatgtgcgctttgttgtgaatactagtttaaagttaaatgacaatgaccaacaagccttccaagctgccaaagaagagttatttgcaccagctgaattcaagcaaattgttagtgactggcaaaaaaaggatccagaagctgctaaattagcggctgatccagactttattgcggcggttaagaatctaacagaagtaaaactaatgagtaaattgaaaggaattaaggatgagactgaaacaaattaagattattaactttgggcagttctcgaataaaaccttcgatttgcctagtgatcaaattaatgttttctttggtgccaatgaagctggtaaaagtacaacggtagcttttattaaacagatcttatttggctttcatttgagaagtaactcttcaccgttttttgaagattatacgccgctagctcatgttagtccgatgggcggtaatttagtttttactgcagctgatggtgaatacgaacttgagcgactctatgctaaaggtgacaagactaaaaagggaattttaaccgtcaaaaaagatggtcaagttgtacctgagagtgtattttttgatcaaattcaaaatattgatggctctttttacgctgatagttttatttttaaccaagaaatgctgggtcaggttaacagtttaagtcaagaggatttgcttgagcgaatttattacttgggagcagcagattctagcaagttgctggaaatgcgcgacgattttgccaaagaaacgggtaagctttttaaaaagacaggtaaaaagcccgaagtaaaccgtctgcttaaggaaatgactgatcaacgtgataaattagcgcagactaaaaatgagtttaatgattatgaacagctgcaccaagattttgtacaaaaaagagcggcattaaacagacaaaaacaagatctggctgttttacaaaaacaagaacaagatttgcatgatttgcaaaaagaaatgggcaattatcagacgctgcttgatttgcaaaaacaggtcaaggatgtcgactttaatggtcaaaattatcaaaaagcccaagatattatggctcagggacgtaatttgcaaaagacgattcaatcggtagaagcgcagttgcagggcctgggtgaaaacgatcagtctgattttacgctagagaagaagctaatccagcagaagcctcaactcttgcagtggcaagcggaatatcgtaattgtttgcaaaaggctgaccaattgaagcaggagaaagagcaactattagctttgacacctgagttaaaaaatctactcaagttgacaccagagcaaattgaacaaatgcaggcagactatcaagctttgccaggtgctgtcaatgagcctgcttatgtaactactaatgacaagctttggtatgttatcggtgcagtgttagcggcattaggtgtagttcttttggtagcgttgggtacagttggtgtaattgcattaattactggactaattttcctagcagcaggatacttaaaaaatagtaaccaaaataagcaaaatgcggcagtattagaaaagcaaaagctggttgctcaaaaacgccaagctttccaaacaaaatatggattgaatcctgatacgctaaacttaaatagcttactaactaatctgaaccaatatcaaatcaaaaagaatgccgcacagactaataataagcaagtaactgttttgaatcagaatgtggctcaactggcctcaagtgtccaaaatgcattgaagcaaccgattgataatgactttagtcaagttttgaacggtttggacgaacttgagacacaaattagtgaaaaacaagaattgcttcaaagaaaatccagcttaactgcatcactaaagcaggacaagcaagatttgaaagaattgggtctgaaattacaggcactttttgcccaagctaatgtggaaaatatggcaggttacgatcagctttatcaagattcacttaatcaggctaaactgaagacgcagattgcggccttgaaggaatcgttaggcgatgatcttcaacagctgcaaatgcagacaaattcaaccgaattagcagataaattaacggctttgactgaacaaattagtactaagaatgcagaaattaatgaacttcagagtcaagttgctcagttgcaagtgcagttagacaatttagctgattctactgcggtgtttaaggctaagcaggatctggctaatacagaaaccaattttgtccagagcagtaaagaatacttggctaacttgtttgcggcaaggtggatcagtcgctcgcttgacttggcatctaatgaacggttccccaagatgcttaaggcggctcaggaatacttagctttgctaacgggcggcagatatgttgggattaatttagataagaagctaacagtagtcagaagtgatggtaaaaagcgcgaagtaaaatacttgtcacgggggactgctgagcaattatactttgccttgaagttagcttttattgagcagatcaaggatgaaattaatttgccaatcttgattgatgattcgtttgtaaactttgatgatcagcgagtcagctatatcgatcagttattgcaaaagattagcgaaaacaatcaagttttaattttcacagctcaaaagaatttagttgatcagcttgggattgagccattaacttttacgaaaggaacacaggatgcttaagagattgttagattacaacgatggagaagaaatggacattgttgttttgattagaaactcacagttgcgtcataataaaaagaataagttgtttttagcgatgcaattcagtgatggctcaggcgagattcgcggtaattactgggatgctaacaatcaagatgcagcaactttttcaactgggacaatcgttgagttgaatggcaaaagagaagaatatcagggtcgccctcagattaggatctattctctgcgcgtggtcggtccacaagaaggctatgaattagatcaatttattaaatcagcgccggaaccagttaatgagatggaagctgaaattaataaatttgtgatgcagattgataatccgacctggacaaaaattgtgaagtatttacttcaaaaatggcatgatcgtttttatgatcatcctgctggtaaaagcaaccaccatgcggtccgcggaggtttagcttttcatactttatcgatgcttaaggatgccaaaggtttggctgataattatgagcaagtgaatagatcgctactttatgcgggatgtattttgcatgatatgggaaaagtactggaactttcaggttctgccgcaactcaatacacgactgaaggaaatttggttgggcatctggttttaattgatgaacaaattatgctggccgctcaggatatgaagatgaatctggagtcggaagatttactcttattgcggcatatggtgcttagtcaccatggccgctttgaatatggttcacccaaattgccggcattgctagaagcggaattattgcaccgaattgatgatttagatgctgcaatttatgcagtaacgaatgccctgcagcatacgcctaaaggcgagttcaccgagccactactgagtcaagatggcaagcgatattatcgaccgatgcacgattcagcgctagataacgcaaaacatttagaataagaaataagcatcactgcagttgatttgcagggatgcttattttgttgaaaaattgaactagagttttattataatttcatagtataataaatctaatttataggggagtaaaaaggatggatattgctgaaattactaaaatgattgaggcggttaaacaaataatagaaaagaatgattacattgatttgccgctatttcagaattctagtcaattaaggttaaaaggaaataattataattttatacttgatttgaatagaaaaggacatagacgtcctaaatgtacttttctattaagggaaaagagaaataaggaacagccattagttagagtagatattattggacgtcctcatcaaaatcctgttggagactttaaatggtcaaataaagtcattccttgtcctcatttgcatagagcggattttccaaaatatggtacatatgtagctgtaccacttttggaaaagaatgaaaattttcaattgagtcagaatgatttaaataacttgtgtgaatgcttgaagaagacattaaagtttttgaatgttgataatataaattcatataattttcgagaacaggaaagtttattttaaagaaaggggggagaacagttaaatatgtttgatgtagagaaaatgaagaaaatatattttgactggatagataaaaagattcaatttgtcccttctaaaaatcaggattatatgactatcactacaccttttttagatatgtacaatgattatatagaattagtgattgcacaaggaaatacatcaaaatatataattagtgatgatgggtatactattaatgagttagggttattagatattaatttaaacagaaaatctaaacgtagggactactttcaatcgattttgattaattttggtgtgaaaaatcagaataatgaattagtaattgaatttgatgacttagcccaatttccagatgcacaaaataggttaactcaatgtatgttgcaagcttttgatttattacagacttctaaaaatagtgttattaagtattttaaagaagatgtaacaaattattttattgataataatattccagtaggagaagatttgagtttactaggaaaaagcggacggaattctaagtttgatattgtggttggacgtacaagaaaaaaaccgcaacaagctattaaggtggtgaatacgcctattaattctaatatagctaaccctttatttagaattattgatgtacgagaaagccaacctaaaacagaattttcagttattgcgaacaatattaatagtcctgtttctagtgattttaagtctgcctttaagaactataatattcctgtttattcttggtcagaaagagagcaatggctttccaaatttaaattggcaatgtgatagttgattaaaggtgttgagctgaaattgtaaataatattagttctagcattaggcaatatggaacatttagaataagaaataagcatcactgcggttgatttgcagggatgcttattttgttttggtgaaaaattgtgtcaataattttttgaacaaagttattgacaaattagctgaagaataataacatgtttatacaattgaaaagcagagatgtttttggatagattagagacttgtctcctttctatttttttattgataaaaagttcaagaggtatacattgatttcctcttggacttttttgatgcattgaattgctaaagatgttataaaaattagggtagggaataaaaatgaaagcatcaaaaaaattaattttagtatcggcagctacgataatgttgactgtacctgttttagcaaataatcatttgtctaatccagttgttgccgcaagtcaagataatacacaaactactaaattaacgttctatattaaccacaatgcctatgtttacaatcatcaaggtaagcgtaccaagagcaagattaagaagggaaagttactaaaggtgactatattgaagcctaaggcaattactaacccaaatcaaagcaggtatttcttcaataatgtattagctggcaagtatttttcgttaccgacagtaagcatcaagaagacagactttgttaatattggcaaaaataaatatattaagccaggcaacattggtagaatctcgccaggaaaatatcaatatgcggatctgtcaactaaggaaattaaggtaattaccaaaaagactgctccagtaactaatcaaatagggatgccaattgctgctccaattaagaagggaactaagcttacagttgatcagaactattatcataatgttgacggcgctgatgattatttgagtagtctggaatattatcggattaaaggtactgataagtgggtcaacctacctgctatcaaaaagtcaactcggattatgccaaataattttgcattagctgcatctactgaagataattatgtcattgccggtaactcaacgtatctctataatattgacggtgaaatcgttgataagagttatttattgattccagatgttaatgttggcgttgatcgagctctttatatttggaacaagcaaactaaacaagctgatctatattatcatcttacggctaacaaaaaattggtctgggttccagctcttgatggaacaggcaagactggtactacgattaccagcaacggctcatatgctcaccaaactaaagatacagcaaatacttttgttaaagctagtgatgtgacaagtcaaaatccagttgcattaaaagttgataatacaccgagcgaagcacaagcagatgcaagtcaggccactgctagtgactatggtgagttgcaagccttagttgatcgagcaggtcaaattaaaaaatcgactttatatcgtttgactgaaaaagcacagcaagaaagatatgatttggccgttgataacgcacaaaagttattgactaacaagaatacttctattgcggcagttaagcaggctagttggcaaattaaatacgatcaaagtaaattagacggacaaaaagtttgggttaaaaacatgaataaactaactaaggcagaaaagtcttgggtagtttcattggctaattgtgatatccatggtgatttacaaaaagaatatgctggcttttataaaggtaaaattgcggtagtgacttataataaaaagactttcaagagtgaacttgtacgctacttgaagttgtctgattatgctactgataaataaaattaaagagctcaagaatgctttaatgatgaagcatcttgagccttttgatttgtagtaaaaaaatatccaagaccgaaatcttggatactcattggagctggaactgtgcttgatgaggcaactgctagaatggcgattgtttcaggagctagattcgttgttagcccatcttttaacgaaaatactgctaaggaatgcaatctgtatgcggttccttacatgcccggttgctttagtccaacggaaattcaatctgctttaacttatggtgctgacgtagtcaaaatcttcccaggttcaattgctggtaaaggcattatttctgaaattcatggacctttcccatatgttaatgtaatgccaagtggtggtgtatcattaggaaatatgcatgaatggtttgctagtggtgcctatgttgttggtgtaggtggcggattagttggacctgctaaaaatgatgattataaagctgtattgcataatgctcaagcttttcataatgaatttcaaagtattatttatgccaactcagctgctactaggaaggtgccagtgagggcatagtttttttactgggggggaatatgatgcccctattaaaaaaataaattaatgaaataaaaaaacgtcgaatccattcagattcggcgtttttgattaactaaatatatttgttacttagtagttgaaacgtatgatgataatacatccttcaagtcgctatccttgattgaaacgtcagccttcttcaaaacagtagcaataacgtctttcatagtagcttggtcttgagccattgatgcgtaaatttggtcatcgatagccttcttgtgatcagcaaacttacccttagctgggtggctgatcatcttgattacgtggtaaccagattgtgacttaactggagttgaagtaacttcaccagtcttaagcttgaatgctgcagtcttgaatgagctgtctaaagtagtgtcagttgagtcgaatgatggcaacttaccagccttgttcttagtagcagtatcaagtgagtacttcttagctaaaaccttgaagctcttgccatctttcaattgcttgatgatgctttgagcagttgacttcttagcaaccaagatgtgttgaacagttaccttaggttggtagctcttccaagcttgttgttcttgcttcttagtaactttcttaatgtgcttcaatgcttgttcagaaagaaggttagtcttaatgttttgcttgaagcttgaagcagtcataccgttttgttgtaaaacagcactaaattgtgagccgtattgcttcttgtagttgttgtattgcttgtcgactttcttttgagatacgtacttgccgtattgttgttccaaagcgcggttgataatcatattagccaaagttgacttaccggcttgtgacttcttcatttcatcgtagtattgttgttgagtaatcttaccgcccttgtaggaagcaacagtagccttagtgccgctattagaacaagcagcagttgataatgcaacgccagctacagctacgactgcagcaatttttttcatataactcttcataaaaataatatctccacatccttaaataagtaactgttcattaatataccataaaaaagggcgtttcgttttcaaattacgaattttcacagaaaaatcaaattttctttattttttcttagttctttgtgtcttgtgagttagtatctggcacgatgttttccaaatcttggttcaatttatcgctctttttttctatgcggttaacgataggttgaatatggtcggaataatgttcaacactatcattaatatcactaattgtacgttcagctgttggcatttgttcatttaattcttgactagcctttttagctttttgcaaggcagaattaaagcgttggctttcatgtttaattgcttcgaactcatcttttaatggcttgcctgggcgattaccattgctatctttcatacaggaaaaaactagcccagctgttgcaccaaaaactgtgcctaataagaaatgtttcatttttaacctctaaaattgtgccttaattttgttagcaacttcgttgtatttagcttcatcgtatttgtcagcgttgttgcgggtcatcagcttcaagccatcgccttcaaaacgaggaatgaagtgaatgtgtgagtgcataactacttgatttgcggccttaccattattagtagtaatgttcattgcagtaacattagggaaggctgccttaattgcattagcaatttcaggaatatattgtaaatagcgttgtgcgtcttccttggtgtagtcaaacaagttaacgatgtgcttttttggcaccattaaggtgtggcctgggttaacttgagaaatatctaagaaggccttaacatcgtcattttcaaaaacggtatagctaggaatttcaccgcggataattttgcagaataaacaatctttgtctaaattttccataataaaacctcatatccttgtactttagtttactattaaatccatgctatcataataaaggtataaattcagtaaagaaagataggaaaaatgacattaaaaattgaacatttaacgggaggctacacgggtgtcccggttattaaagatattaatttggaaattaagccgggtgaggcactaggcttgattgggctaaacggcgcggggaagtcaactacgattaaacatattttgggtttacttcgcccgcaaaagggtaagatcagcttgaacgatgttgtattgacgcagcaaccaactaagtttaagcgtgaagtagcttatattccagaaacaccgattttgtatccggaattgactttaaaggaacatttggagctaaccatgttgagttaccacttggatgaaaataaagcatggaaacgcgcacatgagctgcttaagatgttcagacttgatgacaagctagaatggctgccgattcacttctctaaggggatgcggcaaaaagtaatgattgtctctgcctttttagcagatactagtttgcttgtaattgatgaaccatttactggccttgatcctttggcagttgctaacttaatcgatttaataaaaaaagcaattgctgacaaaaagatggtcttaatgactactcacgttttagctgatgcacagcaagcgatttcgaattatgctgtgttaaaccgcggcacgatcgaagttgtggggagtttgcaagaaattcgtcagcactatggccttaagccagatgatccttttgacaagttataccttgctttgaatagagaggataatggcaatgcgtgagttagcgaatagaaggttgagcgagaatcttaaacaatcagtaaaatatttgacgctggtgtttaatgacttctttattttagcgttgatctttttgtttggggcgctgatgttctggtatgcccaagctatgcgcgtaattcccaataatctgtggttctataagccacttgtcggctttatcatgtggttgccattattagctggtcgattagttaccttattaaaagaggccgacatgcaatttctgtttacgcaagatgaacaaatgggtgaatatctgaagccgatgattcgttacagtatggtgctgccaacaattctgattgttttgcttggcggaattctgtttccgtttgcgacggtaaaggctggaatcccagtttggtcatatgtaatcctgattatcagcactgttttattaaaattgtgtatgttgctgattgaaaaagagagtttgtacttctactacaattatccgcaatggatattattagtggtaactctggcggctttgttgattggctcactaggatcatttatttatccaattgaagttgtagtattaatggtaattacgcattttggtactaaaaaagaaaagggcgtctttaactggcgctatgcgattaaaactgaacaagctagaaaagatcgcgtttattcaatcttcagtatgtttaccgatgtggcagaaaagcaagttacaatcaaacgcagaagatacctcgactttcttttaccaaaatcattggctaaggaaaatcctaatttgttcttgtatcggagatcacttttgcgtaatccagaatacttgaacttattagtcagaatgactgtctttgcaatcttggtatcgtggttagtgcaagattggcgttgggcactaggcctttcatgcttggtaatctttttaacggtctatcaattattgccaatggcaacagagtttgaccgcaacttcatgtaccgcgtttacccaattgaacggcaaaatcgtggcagggacttggtagaggtgttgacaatgggcttgtttattcaatggctcttgattagtgtctgctggttaattgtgctaccaattaatgttaacttgtttgaagcgatggcaattttacttggtttcactatgattgtaactgccacttacttgccaggcagagttaaaaaaatgaatcaaaaaaattttggaattagataggaatagagaatgagattaagaaataaaccttgggctgttaagcttgtaaacgaccatccagaaagtgttttgcaaaatcctgatcctgaaaaaaagatcgactggactgaacgatttggtaatgatcatcccatcgaaattgaagtaggttctggtaaggggcatttcattactacgttagctgaacaaaatcctgataaaaattatgttgcattagaattgcaaactacggctgcggggattatcttgcgaacaaagttggaaaagggcttggataatttacaaatcttacgcggggatgcggctgacatcaactgcttctttccagcaaatagcaccaatgttatctacttgaattttagcgatccatggccaaagactcgtcatgaaaagcgtcgtttgacttacaagagttttttgagcaagtatgaacaagttctgaagccagaaggacatattgaatttaaaaccgacaatgcgggcttgtatgcttactctgttcagagcttgaataattatggaatgaagtttgattttgtttcagttgatcttcatcatgaaaagccagagattgtggaaaagaatattgaaacagaatacgagcataaatttgcagctaagggtaatccaatttatgctttgcacgctcattttgaggatgaatagtttgaagcgtctagagttacagcagataaactctaggcgttttttaatgctttattggataaaatcttgctactagctcatcgctttagttattttgttttagaatagaactgtaagatttcagattattggagggaaaattatggaagataaaccttattatgaacaagaatatcacgaacctaaaactgatattcctagaccaacttttggacaagcattcaaacttttgtttactgcaccatttaagtagaatgcacgtagtactcgtcgtggattttggtatgcctatgtttgggcaattattttgctagtcattttagcagcatgttcagctacggcatattcaattgatggcattgcttattcaagtaatgaattcttcttattaacgcacgtttcaactggtacacttattattcaaataattatctatctactgattatttggatcttattaggcttacttggctttaccataagaagattgcatgatactgaccacaccggttggtggtactggatctcggttattccatttgggtatttgtttttactttacttcatggttttgccaactgttgaaaaaccagttcgttggggcagttatctatttaaagaaaagaaataattgtaagactcaatttctagctttttagttaaagaatggttataataatatcaacttataaaaagtaagaaatacatgaggtatgaaaaatggaaaagattaaagaattaactgaagatcaattaaaggaaattactaaagaaggacgtactgtgcttgaattctcagctgattggtgcccagactgcaagtttcttgctccatttatgcctgaaattgaaaaagatttttctgatgcaaaattctacgaaattgaccgcgacggttcaattgacatagcaaaaaaattaatgattatgggaattccttcatttgttgtctaccaagatggcaaagaaattggtagactagtaaataaggaccgtaaaactaaagatgaagtggaaaactttttacgatcacttgactaatagaggagaaaaaaaaagcatgattactagtactaataaagaagcttatcctaacactttgatcgttatcttaggtcacgatgaaggccgtagctcatttgaggaaaaagaagacgttactcgcgtaactaacgatgaaggcaagaccattggttacaacttcttcaacgttgataagttagttgactttgataagttaccaaatggtccagttaagttgtcagacgatgagcttgttgcactgaacaagaagcttgatgaagttggttttactgacaagttagcatatggcaagccaactttagtttatggctacgttaagacttgtgaaccacaccctgattcagatcacttgcacgtaactactgttgaggttgctgatggtgaagaacaccaaatcgtttgtggtgcaccaaatatcgctcaaggtcaaaaagtagttgttgcacttccaggtactttaatgccaaatggtgcacaaatttggccaggtgaattgcgcggtgttgattcatacggcatgatttgttcagctcgtgaattaggtttgccacacgcaccacaaaagcgcgggatcatggttgttcctgatagcttcgaagttggtgcagaatttgaaccaactaagtgtgatgaattgattgctagtggtgaaattactttataatttgaataaagcaaaaataaaaagttaaccagttggtgcaaaaaagctaattgatcaacttttttattttgtctaagaaaagccaccagtttcaccttttaaggagctagtgaaccaattttgtgggaaatagttttacccgtaaggtctttaatgatcaaatgatcgacagtattaacataattgtcgttttcatcatagatttcttttgattttaaaaattttagcataagaaaaatggtaaaataattaacgaataaaaacgttgaaatttcgagggacaaataatgttagataaaaataagcaaatttggtttattggaatcaagggtactggaatggcatccctggcactgcttttacatgacttaggctataatgttgccggcagtgacatcgagaaatacactttcacccaagttccacttaaaaaggttggaattgaagttaagaattttgatccagctaatatcaagagcaatgctgagcaagtaattgttaaaggaaatgccttcaaggaagataacccagaagttaaggcttgcttagacaaagatgttaagtggcagtcttacccagatactgttgaagaagttgttcaaagtcatacttcaatcggtgtttctggtacgcacggcaagacttcaactactagtttgctagcccatgtgctcggtgaagtcgctccgacctcatacttaatcggtgatggtcgtggtaaaggcgttgctggttcacgtttctttgtatatgaagccgatgaatatcgtcgtcactttttggcatatcatccagattaccaaatcatgactaacatcgactttgaccacccagactacttcaaggatcaagccgattacaccagcgcttttcaatcagctgctgatcaaactaagaaggccttgttcgtctggggtgatgacaagcgtttgcaaagtttgaagaccgatattcctaagtacacttatggctttaatgatactgatgactttcaagctactcaaattgagaagtcgactactggttctaagttccacgttttggctcacggtaaggacttgggcgaattcgagattcacctctttggtgaccactcaattttgaacgccactgctgttgtggccgttgcttacaccgaaaaggtgccaatggaagacatcaagaagggcttgccatcattcaagggtgctaagcgtagatttagtgaaaaggacttcggcgacattgccgtcatcgacgactatgcacaccacccaactgaaatgcgcgccactatccaagctgctcgccaaaagttcccagacaagaagttggttgttgtgttccaaccacacactttctcaagaactaagaagtatcaaaaagacttcgaagaaatcttgcgtgacgttgataaagcttacgtaactccaatctatgcttcagctcgtgaagctaacggtgatatttcaagtgaagacttggttaagaatattcctggctcagaagtaattgacttagacaatattgctgacttgactaagaataagaattcagtcattgtctttatgggtgcaggtgatattcctaagtatgaagatgcttttgaaaaattgctttaattgaaagataagcatgaaaaaaactgttctcaataagagagcagtttttattttggctaatctttgattttatccttgagatccaggctcttttcataaataaagtaaccgatgatgcaggtgatgatatcactggctgcttgagcccaaacgataccgtggtagccaaatgtgacttttagaatttctaatgcgataaagtagacaacgccttggcgaacgatggccatgataaacgctgcccatgcattaccaactgattggaagacggtagtgtaaactaaaatgataccaacgattgttgtggtaataatagtggcaattaacatataattaccagcgttaacgatatctggttgattcataaatagagcggtgactggacgagcaaataaaattaataatccgcctgaaattacagcataaacaacttgcacaagaatatcgaagtttagaattttctttaatcgtttccagtttttagcaccatagttgtaaccaattaaaggttgtgaaccaaaggcaaaaccaacgattaccaagataacgatactgtaaatcttttgggtgattcccattgcggcaactttgtttgcaccgtatagagctaaagatgagttaagaagtgccatgccagagctttgagcgaagttggtgattgaaccggggatgccgattgctacgatatctttgattgttttgccgctaattttgctatattttagctttaatttgatgtagtcagttttgtataaaacgtagtaaatgagaatagcatcagtgactagataacctgtaacgttggcaatcccaacaccgattgcacctattttgaaaacaaacaagaaaataggatcaaggatgatagctaaaatggttcccgtcattgtagcaaccattgcttgggtagctaaaccttctgttctgattaagttctgcggaatgattgagaagataattggcgcagcaccaattgatattacacgataaaaatcggcagcatcttgataggtggcagcttttgctcctaaaagatgaaggatcggattttctaaaattagtaaaatggctgttagtattaaaccagtaacaaatccaccgatcatacaaaaactgcttacacgtttacttaattgataatttctttcaccgaatagccgtgaaattagtgaagatccaccgagcccaaaaatgtcagaaacagcgattaaaaaagtaaaaagtggagcaccaatcgtaattcctgctactagatttgtatcacccgttttggcaacaaacatcgtgtctgccaagttgtagatcatggtagtgatcatccctaagacgaccggtaatgctagcttaaagtagaccttttaatcggcgctttagcaaataattcatccataaattttccccccacattgaaaaaagcgacctagaaagatactttgaggtaaacctcactattctaggtcgctacgttatatcatttatttaattttagcatattgtgttaatttgcgaggtgattatctaaattaaagttaccttgaaattcatcagtagtgctttcttgatccataccatattcggcatcgtcgccccagtaaatgtattgtgcgtttttacctttggtgccagcaattctgaagtaaaggccagcttcatcaccttcaccagtggtcttggtggcatctaccttaactttttgaccaatcttgagcaacttgctggttgatttaagcttattattcaaaacatggattttgtttaaaatagtggcggtagtggtgccagaagcttggtaaagggtgttgccgttgacaaagccaacatttgaagcatagatataagcgccattacctaaggcgtagaatggcttacccttgatagtggttgtgttcaaacttctctttttagacccgctaagatttgagaagtagtaaaatacgtcattcttagttgtggcgtgggttttagctggtgttttaactaacatatatttagggatgagtgacaaaccattgaaagtagtgcggtgaccgtttttatcataaatgcgagagttggaactcaagattaaaacattttgtccatccattgagctaacattcaaagatttgatgtagcgttttttaccgatgttaacgtaagaagcggtagtgtagtggtagttcttagaagtttttgcatctacttttttaccttggatcaggataggcttgccataatatttaaaacttgagcctgatttaatcgttgaagcaacagtcatcttcttgccattgactttttgggtagtggtagtggcattgcctttgctgttgaagacttgaactgtgccgttaaaggatttcttgagagtaactttacctttttgtgattgcgtagctgcttgaactgtgtgaacaggttgattgataatagcagctgctggtgcaacactgattaataaagctgctgcgatagttgctaattttttagtagtcatattttgtctcctttgtaataatcccttaagttgattttagcacttatgagactataaaaataacctcgaaactcaaacgttttcggggttatttgattttattcacttaagtacttaggatcaataaatttattgatcacgttgttaaccttctttgaattattgtacttgcggataatgttcaagaagtcttgtgcagttgcttgcttcaagcagtaagtttgatagtaatcgtgtaaagcatcgaagaacttgttttcgcccatggcaacctttaaaacagcagggaagtccatcccaagttcgtaagccatgtcttcagtgtcaacgccctttggtggattattaacagggtagttgatgtagttggccttttgattcttattaatgaattggttagcattttcttttaagattttgttagcacgcttgacgttcttacgagtatagaacttgctgtgcatcagtttagcacagtaagccttactcttagtgtaggtcaaatcgtaaacgccattttcaaggatgttggtaagaccttcgtcaagccaaggttccatgtattcgtcgctgccgacagtgccgtagaaccattggtgaccaacttcgtgagaaacatcttcagttaattcattatatctatcaagtgggtgcttctttagtaaaaagccgctggcatcgatcatgatcaagccaggatattccatcccaccggtatctttgctaagcaagccttcagtaatatcgatttctttgtaaggatatttgccgatctttttggtaaaaatgtgaaaactgtcttgggcagtcatcaaagcaagcttgttgtattgcttgctgtttttgcttgcaaggtagtagtcgttgattcttacgccgtttgcataagcgtggtcaatcttgaacttgttggaagtagcgattgcgaactcacgcatgttgttggcggtaattgtagttttgccatttttggttgtgctttgaccagaagcggcaactttgtagctctttggtgcgaagaagctaacgtggaaattgcttacagcactgttgcggttttcaccagcatcgtagtatgggtgataattccacttaccgttgcgataatcgcttaagtatgggaaacagaatgacaggttataaaccttaccgccgttgatattttggtagccaaaacgatcttgtctcttaggcacgccggtaactacgttgacagttaaatcagtagattcacctatatttagacttttgttaacaaataaattgctcttgtctttaccggtagtgtaagaaagcttttgaccatctgatgaaatgcttttaactgaagttgtcgcatttcttgtagcctcaaaatgcttgtggtcgtatttcaacacgccgctagcaatatttctaaccaataaatttttaacaggttcattaccgttattaacaacgtgcatggtaactttttctgttaattgattcttgcgagtgtccaacttcacgatcatgttgtaatttgttgccttgatcgtaggatcagccgcagcttgaacttttgagttgaagctaaataatgccgcaatggttactgcactcgacaataaaagtgttgttcttcttttcataattttccctccaagaaaaatttattctaattattggaagttatcagcataaagtcaatctattttttgatgataggatataatttatgtataagtgaaaatgaatagatataaagaaagaagataaataagaatggttaaaagtattacacctcatttgttttatcgcttgaatgggatgcaccatgttgtagcccaagttggtgtagtaaatggtgatcatgtttttgccttgcaacttcttcacagtgcacatgatgtgttggtttatagaaaacatgaaggtttaactaagaacatcgattatactgatccacacttagtaatgatgggctttggccacacgcaaacctgggtagcagctaatgacaaggatgaatatttcgtaggtgctaaaccaaattcaggcaactggactactcaaattgcacgagtaaagtacccaagacttttaccagaaagatatacttcaaatacacaacttccacgtttgtcacacttgaatcacgtaaccgacgttccttatgatggtcatgatcacttgcacagagtagaagcttcagtttcaccaaatggcaagtacttcatgattgcttcaatttgggatgatggttcaggtcactttggtttgtttgacttaaatgaagtaaaccaaaagttgaatgaaaatggcactaagaacacgccaattactgatttgcattgccttagtgcttttcacattgataactttgatcatccaagcgtggcaccaagtgaagaagctccacaaatgattgattctgttcagggctacgccattgatgatgacaagaatatttatatttctaaccaattgtcacccaagattgatcatgcgaatggtgaagttactacttggtcacgtaagatcgttaagtttccatggggtgaaactaatccagagaactggcaagtagcaatgattgatggtattgatttgcctgatcgctacagtgaagtagaaagtattcatgttcaggcgccagatgacatttatctaactgtggcttaccaccaaaaatatgtcaaagatggcgagtttaagttaagaactttggagaatcaaattttccacattagtgatttaggctaaaattagattcttgagactactgcaaaaggtagtctttttatttttgtaaaaaagctatgcaatttatatgcaaacgatatataatagtggtaaatagaaaggagagggtaccatggctgagaaaacaactggactttatgtcagaatgaatcctgaaaagaaagaaaaagcagaagcaattttaaagcaattaggtttgaattcagctactgcaattaatatgttttatgatcaaattattttacgtaatggtattccttttagagttgagattcctaatgcttgggccaacttggactacatgaacaagtatgagtatgctcatctacttgatgaaaagcttaaccgcttggcagagcagaccgatagttcactaggtgaattagccaagggagtcgatcccaagaagaaggacgagtaatttttagttgaggtataaaaatgggtattgttattacgctaatcgttttagttttagttattgcatatatttgttgtggttttagaattgtaccccaaaataatgaaggcttagttgaaacgttgggtaaatattctaaaactgttaaggctggctttgtctttgtttggccattatttcaacgaattcggaaagttccattggcattgcagccattagaaatttcaaagtattcaattattactaaggataatgcagagattactacttccttgactctgaactacttagttactgattcataccgctacttctacaacaacaccgattcagttgagtcaatggtgcaattaattcgtggtcacttgcgtgacatcattggtcgaatggatttgaatgcggctttaggttcaactaaggaaatcaatgatcaattgtttacagcaactggagatctaactgatatttacggaattaaggttgtcagagtaaacgttgatgaacttttaccaagtccagaaattcaaagagcaatggacaaacaattgactgctgatcgtgagaagaccgctgctattgccaaagctgaaggtgaagcaagaacgattgaaatgaccactaaggccaagaatgatgctttggttgcaactgctaaagctaacgctgaagctgttaaaacacaagccgatgctgatgcataccgtgtataaaagatgcaggatgctttagctaaagctggggaaggctacttcagaaatcaaagcttagacagcttcaatcaattagcacaaggtccgaacaacttgattgttgttggaaaagatgagatgacagatttaggaaaggttccagctttaaagaaagtatgggatgaatctggcagtcaggatgacgctgaataatatggaaaagcacttacgtgcttttttgttttgattactgattgataaaatccttttttgacaaagaatttaattaaatttttgagtaaaaatcgtaattaacagagattcactattttactaaaacaacatgctgaaagattagtatgaaaactggtaaaatagataagtaaaagaatagatctatttgttaaaagggagataaaatggctgataaaaaattacttctaatcgatggtaactccgtagcttttagagccttctatgcactttaccgccaactagaatcattcaagagcccagatggtttgcatactaatgccatttatgcttttaaaaatatgctcgatgtactcttaaaagatgtcgatccgactcatgtgttggtggcttttgatgtgggcaaagtaacttttagaactaaaatgtacggtgactacaagggtggtcgggctaagacgccagaagagttgttagaacaaatgccgtatattcaagagatgctacatgatcttggtattaagacttatgaattaaaagattatgaagccgatgatattattggtacttttgctactaagggcgaagaaaatggttttattactacaattgtaacaggagaccgtgacttgacgcagttggcttcagacaagacaacggttgaagtgactaagtcaggtgtatcacagcttgaggcttatactcctgaacatatgaaggaagtaaatggtgtaacgccaactgaattcattgatatgaaggctttaatgggagattcatcggataattatccaggcgttgaggggattggtcctaaaacagcttctaacttgatccaaaaatatcatacagttgaaaatctgtatgatcatattgatgacttgaaagcttctaaacgaaaagaacgtttgattcgcgataaacacaatgctattttaggcaaaaaactggctacaattgatcgtcattctcccgtgacaattgatattgatgacgttaagcgccaaccaattgattatgaaaaattacgccaattctatgaaaagatgaatttccgtaagttcttggcagaactgaatgctagcggtcaaggccaagatgcaactgaagtagaaaaagttgaatacacagttcttgatgaccaaaatgtcaagaaaatcaaagctaatgcagatgaccaaattgaattttatcttgctatgctaggtgctaactatcaccttgctccatttgtcggttttgctttaaaaatcaattatcaaatttacgtttcacgagatgttgaacttttacaagagactaatttgcgacatttattagaagatgagcaaattaagaaaaatgtctttgatttaaagcggacaatggttggcttacatcgattaggtatccatgttcacggtcaagattatgatatgttgttagcttcatatttgatcaataatgaaaataattccaatgatctaggtgaaattgctcacttgtatggtgattattcagttaaaaccgatatagaaatctatggaaaaggcaaaagtgagcatgttcctgatgacgatgaagaactatttaatcatttggcttcaaaggttaatgctatcgaaaacttgaagcagccactacttgagaagcttaaggaacacgaacaagatgacttgtttgatacaatcgaaattccgactgctcgtgtattagcccggatggaaatcaacggaatgaaagtggaggcaagtactctgctcgaactgcaaaatgaatttgctgttcggttaaaagagctggaggataagatctatcaacaagcaggcgagcgctttaacttgaattcacctaagcaattaggtcatattttgtttgaaaaattgaatttaccagtaattaaaaagaccaagaccggttattccacttctgttgaggtattagaccaattaaagacacaaagtccgattgttagtgaaattttagattatcggcaaattgctaagattcaatcaacttatgtcaagggcttgcttgatgtgattcagccagatggtcgcgtacatacgcgttatctacagacattgacagcaactggtcgactttctagtgttgatcctaacttgcagaatattcctacacgaactgaagaaggaaagcaaatcagaaaagcctttgtgccaaccaatcctgatggttacatcttctcttgtgattattcccaagttgagttgcgggtattagcacatgtttccggtgatcagaatatgcaagaagcctttaagacaggctatgatattcactcacatacagcaatgagaatttttcatttagattcaccggatgaagtaacgccattgatgaggcgtcatgctaaagccgttaacttcggtattgtttatggtatttctgattatggtttatcaaagaatttaggtatttctagaaaacgtgctcaagagtttattgacaattactttgaacaatatccacaaattcgtgaatatatggataaggctgtgcaaacggctcgtgaaaagggctatgcagaaacaattatgcacagaagacgctacttgcctgatattcatgctaagaaatttacagttcgttcttttgctgaaagaactgcgattaactcgcctattcaaggatcagcggccgatattatcaagattgctatgatcaatatgcaaaagaagctagatgaactacatttgaagaccaagatggtcgttcaagtacatgacgaattgatttttgatgtgccaaaagatgaattagaaacgattaagaagatagttccagaagttatgcaatcagcagtgaagcttgatgtgccattgattgcagattctggttggggtcataattggtatgatgcaaagtaggtgatttaatgccagaaatgcctgaagtcgagacggtgcgacggactttaactccgctaatcgttggaaaaacgattaaaaaagtagtactttggtatcccaaaattgtggcaacagaccataagaaatttatcaaagaactaccaggtaaaagggtcttaaagattgatcgctatgctaaatatttactgatacgcctaagtgataatttaactattgtgtcacatttacgcatggagggaaaatatcatttaaccactcccgatgcgcctaaggataagcatgaccacgtagagtttatttttactgatcaaactgccttgcgttataatgacgtgcgtaagtttggccgcatgcagctgattttaacaggtactgagcgccaagtgacggggattggcaaactgggccctgagcctaatagcatagaattttcgtcagattattttatcaaggccttgagccgtaagaagaaaaatattaaaaatgtcttgcttgatcaaacaaccgttgcaggtttaggtaatatctatgttgatgagacactgtggcagagtggaattcatcctttgagtgccgcaaataaaattccagcagaaaaagcaaaagagctgtggcagaatattaaccaaactattaaaattgcaacaaaaaagcgtgggacgactgttcatacttatttagatgccaacggaaatgttggtggctatcaagaaatgctcaaggtttatggtcatgcaggtgaaccttgtgcaaagtgtggcacggaactagaaaagattaaagtatcaggcagagggacaaccttctgtccacattgtcaggtggtttattaatgagctatgttttagccttaactggtggtattgcaactgggaaaagtacagcggaccagttttttaaagcaaataaaattcctgtgatcgatgatgatcagattgctcatgatttgatggagcctgggcaagcttcttggcaggcgattaaagattattttggctcagagtatttaaatgatgaccaaacgattaatcgaaagaaattagggcaattggtatttaaggattcgcgggctttaactaaattaaatgagttaacgcatccgttgatttttttgcaaacaaagaaattgctaaatcaatatcaagctcaaccaatagttattcttgatgtcccactttattttgagtcagggatggataagaaagatatagctgacggtgttttagtgattactttgcctgagaaaatgcaattacagcgtttgaaggagcggaatcatttaaccgatgaagaagcaagaattcggatgcaaagtcagttgcctatggtcaaaaaagagcaattggctgattttgtgattgaaaatactggtacaataaaagaactagagaataaactagcacaattattggtaaagattagagaagagggatagctatggaatgtccaaattgtcatcaaaatgcttctcgcgttattgattcgcggcctagtgatgaaaaccgggctattagacggcgcagagaatgtgaaaattgtggttttcgctttactacttttgaacgagtggaaactgctcctttgttggtagtaaaaaatgatggtactcgtgaaccattcagtcgaaagaaaattttgcacggagtaatggcagccggacaaaaacggccaatcagtagtgaacaatttgagcaattggttgatcgtgtcgaaaataagataagaaaacaaggcgttagtgaaatttcatctaagaagattggtcagtatgtcatggatgatttggctaatttggatgacgtagcttatattcgctttgcttcaatttaccgtgagttcaaggatatgtctagctttatgaagacaatggaagatatgatggccaaaaaaggaaagggtaattagtcatgttcgcaacgtctgatcctaagcatctttattatgtagccaacaagattaccctttttccagagaatgagaaaatcttgattaaactgtatcagcctttggttggcgcggtggcaattgccttgtatcagactttgatcaatgactatgatccatatggtattgtttctgattcaaagggaatttattcactacaggagcaacttgattgtagtttaaaagatatgtttcattctttgcataaactggaagccgtaggtttagtgcaaacttttttagcggataatgtcttcaataatatcattgtttttaagttattacaggttcctagtgcagacaaattttttgcaacaccactgctagcaagtttgttgaaagaaaaagttggcagcccaacctttcatgacttgagtcatgcttttgctaaggaagcaaaactgcgtgaaaagccaatcaagaatgcgcgcgatgtctcagccaacttttttgatgtttttcgcttgccaggggatgaagcaattaatccatctaatgaggtagtagaagctgcgcaggaaaataaagcgcctgagatagaaactgctgaaattaatgcccaggatccaattgattgggatctgattaaagatcaatataatgtctatcaaattccagctcaagaagtagaaattaaaaagaaccaaattcggggcttaatacagacatataatttatcggaacaggaatttgtggatgagactgttccctgtttgcatggtacacataaattaaacatgcatgaaattagtaataccatagcagaaaattataaacgattgcatactagggaaaacattcaaaaacaaattgaagaaggcaaaaagcgcgctattgcgactatcaaaggtttggatgctaatgatagaaaactgttactcgaagctaatgaaaattccccatctgaatttttatacaaattaaaaactgaaaagggtggaattgtagctccaggcgaaaactatattattaatcagctgcacacgcagtatggcttgccggaagatttgattaatattttgattcatacctgtttgacctacgatactgttgtaacttctaatcgtgcttatcgaatagctaatgattggctgcaaggtggtattagtactggggtacaagctcttgaatatgtgaagaagcgtaaagccgatattcttaaaaagaaaaatcgacagtcatatcgacaaaataagcgagtcgaaaaaggtaccgattggagcaagaaaaaggctaaaaatgaaggtatgtcaacagaacagctgaaggatatctttaaggatctgaaaaataagtaaatagagggtaggtgaaataatggaagcaattggtgatttgcttaaaaaaatagttaaagagcgtaatttaggtaatgagaaagaactgttgaaaactgctttacacgatccagatgtgcaagcgtttttgcaggcaaatagggaaaaaatagataaggcgatgattcgaaatagtatggccaatatctatgaatattatgcgcaaaaacatagtcagaatcaggtgctggccggttatgctccgcaattatttttaaacggcaaagtaattgatgtacgttataaacctaccgaggctaagattgtagcagatcagcaacgagcagccaagcggcgtcttcatttaattgatctgcctgctaaattgcatgatgttaatttaagtgatattgaggttacaaatgatcgccagcaagctttaaccctgatttatgattttttgaaaaagtacaaagctgatcctcaccaacaaggcctttatttgtcgggcgactttgggatcgggaagacctatatgctagcgggacttgcaaactatgtagcaactaattttgatcggaatgttgtatttttacatgttccaacttttattgcaggtttatcaagtcattttggtgataacagcttgcaagatgagatcaggaatttagctgaatgcgatgtcttaattttggatgacattggggcagaaacattaagtcagtggtcacgtgatgacgttttaggagtaattttacaggcaagaatggataatgttttgccaacctttttctcttctaatttagatatggaagcattagagtcacactttgaggaaacccgtaatgcaactgatccagttaaagctaaaagattaatgcaacgagtacgttttttagctaaagaagtagtagtttccggtcccgatcgacgaaatttttcgcattaatttcaaaaagttcttgcatcgttcactttgatgcgtataattgaagttaattaaacgagacatgatgatgttcggctcagagagaaggacctagttctggaagttcttcattagaaaatcaccccaatcgtttattcccaaaattgaattttaagaggctggatacctttatcaatctatacgagaggttagacgtacgctaacctgaattttgggtggaaccacgcaattaacacgtcccagtgcttttattagcactgggatttttttattggaggtaaaaatatgagtttttcaattactttgccagacggttcaaagaaagattttgataaggctgtttcagttaaggaagtagcttcatcaatcgctacatctcttggaaaagctgccgttggtgctaaagtaaatggcgttgttaagccacttgattatgaaattgacaatgatgttgaagttgctattcttactgacaaggatgaagaaggcttagacattttaagagctactgctgcttttgcacttgaagcagttgctaagaacaagtacccagaacttcgtttgggtcaacatgttgctgatgaaggcggcttttacgtagatactgacaaagatgaccaaattaaggttactgaattgccagaacttgaaaaggctatggaaaaattagttaagagtggtcaagcaattgaacatgttgtaatggacaagtcagaacttgaagatattttcaaggatgacccttacaagactgatcttttgaagaaaattgatgctgacaaggttgatgcttacaagttaggtgatttcgttgactttggctttgatgctttattgccaaacactggtaagattaagcacttcaagcttttgtcagttgctggtgcttactggcttggtaaatcatccaacccaatgcttcaaagaatcttcggtactgctttcttcaaggaagctgctttaaaggaagatttgaagcgtcgtgcagaaattaaggaacgcgaccacagaactatcggtcgtgaccttgacttcttcttcgttgatcctaaggttggtgctggtcttccttactggatgccaaagggtgctactattcgtcgtgttgttgaacgttacattatcgaccgtgaagttgctgacggttatcaacacgtttatactccagtattaatgaaccttgatgcttacaagacttcaggtcactgggcacactaccgtgatgacatgttcccaccaatggacatgggtgatggcgaaatgcttgaacttcgtccaatgaactgtccttcacatattcaaatttataagcaccacattcgttcataccgtgacttgccacttcgtgttgctgaacttggtatgatgcacagatatgaaaagtcaggcgctttgtcaggccttcaacgtgtacgtgaaatgactttgaatgatggccacacttttgttgccttggatcaagttcaaactgaattcgctaagattttgaagttaatcatggacgtatacaaggacttcgatattactgattactacttcagactttcataccgtgatccaaagaatactgacaagtactttgcaaatgacgaaatgtgggaaagaagtcaaaagatgcttaagggtgctatggatgaccttggccttgactatgttgaagctgaaggtgaagcagcattctacggtcctaagcttgatattcaaactaagactgctttgggtaatgacgaaactatgtcaactatccaacttgacttcatgcttccagaaagatttggcttaacttacgttggtcaagatggtgaagaacaccgtccagttatgattcaccgtggtattgttggtactatggaaagattcattgcttaccttactgaaatttacaagggtgcattcccaacttggcttgctccagttcaagttaaaattatcccagttaaccttgatgctcatggtgaatatgcagaaaaggttcgtcaagaacttgctaagcgtggcttcagagcagaagttgatactcgtaacgaaaagatgggttacaagattcgtgaatcacaaacccaaaaggtaccttacactttggtgttaggcgacgaagaaatgaagaacggtagcgtaaacgtacgtcgttacggtactgacgaagaaatttctaagagccttactgattttattaatgaaattgatgcagatgttaagtcatactcaagagaaaattaattaatataattaaaaaataaaataaaaaaacgtatgctatgccaggtctaattaagatggctttattgcatacgtttttttggtaaagctaatgtaattgattttttacgtttgtaagtaagaagtaaaagaactgtcatcccctttaacttttatgaaatattttaatgaaataatgaaaataggagttatataaggaaaggtgataaacttgaaaaataagctcattatatttatgacaactgcgctattcatgttagctattattgtaatgggtcaaaatagagtagatgctgcatcctggggagctaagaatttatttactacaccaaaggaaactcgcggaacatggtactataagcaagaaggcaaaataaagaagcttaaaattacaacgcatacatttaataaaatcaaattatataaaatgttgagcagtaatcaagcgattaagtggactaaaaaattagctaaaactgataaaaagtcggtacctctcaatacgaagctactgattttaaattttataaaacagcaggttttgctgccaatggttggctttctagtgatagagctgattcaggacacacttatgttgctataaagaaaaaagataaaagtaataatgataaagtagatgcactgcggagactgtaaaatagtttgtgtaaggatgaataattccttaaatttatttctttaaacattagaaaaaggggttcctttctcgtatgattggtttgaacaaaaaaacacatacagaaagaagaactccttcatgaatgattttaccaaaaatatagcacaagctctattcaatccagacaaaataaacgatttattgcgcaaagagctacaacaggctgttaataacttgctagaagctgaattgactgcctttctgggctatgatccctatgccagaaatggctggaatactggcaattctagaaatggtgcttatttccgcaaggttgatacccagtttggaccaattgaagtgcaagtgcctcgagatcgcaacagccagtttcatcagcacacgctgcctgactacaagcagcactctgatgttttggaaagcacgattatcaagctctactccaaaggcgtaactaccagagaaatcgctgaattgattgagaaaatgtatggcagtcattatagtccagcccaagtatcaaatatttccaagcagatgctccccaaggttgaggcttatcacaagcgcaagctaagcgacaagtttttctgtgtctatttggatgcgacataccttcctttgcgccgagaaacgtttgagcgtgaagcagtctatattgccattggcattaaacctaatggacataaagaagtcattgactactgcattgcgcctagtgagaacattgaagtctggacagagatgcttcaaaacatgaagtccagaggcttgaagcaagttgagctctttctttctgatggtgttgttggcatgaaagcggccttgaccaggacttatcctaaagctcattttcaacgctgcctggttcatgtcatgcgcaatatctgtgctaaagtctgggtggatgaccgcgaaaagatcatgaacgaattcaagcagatacatcaacagacaagccaaaaagaagctgcagctgtcttgcatgaattttatgcaaaatggaataaagcttatagccatgttatcaaaggtttgagggaaattgagcccgatctgctggtcttctacaattatcccaaacaaatcagagcttcaatttattcaaccaacatgattgaatcctttaacaacgtcatcaagcgtaaagctaagcctaaggcagaatttccaactgaacagtcgcttgatgtatttattggcatccaggcaatgagctacaatgaccgctatttcaaccgaattcataaaggctttggtcaggttcaggacaccttagaatcctactttgattaaataaataattaaaaaatcaatttacgagaaagatctatttacacaaaagatttgacagtttcgcactgcgagtaggaaatggagcagataattcatttttatattattgttataagagcaaaaaattaatcaaataagttacccggatttaaaattgaagtgcaacactaattgttaaacaaaaaggccatgaagacctaaacttgaagtgaccaaaaatcaagaaaggaagatcttcatgaccaactcaaattctagcatttccaagcattatcatcaattgaacagcgaacaacgtggacaaattcaagctctgcttgattctggcataacctcctgcactgctatcgctcaagaagtaggctgtcataaatcaactatcagccgtgaaattagacgaggcagtgtcctgcaaagagacagcagctatgtcttgtatgagcactattacgctgatactgcacaaatttatcatgaaaagcgccgcagaaactgctataagtgtaatccactgcaacactatgccgtttttttcagaatgctaagcagacgctttaaagccaaatttgatgccactagcattgatgaattcgttggtgaatttcacaggattatgccaaattatccatgtcctagcacgcccactgtctatcgttatattgatcaaggattgctggatataagcaatatcgacctgccaatgaagcttaaaagacgcagaaacaaacgccatcatagtcatggtggccatgctccgcataaaaagaatcttggcaattcgattgaacagcggcctaaagaagttgaaaacagaaaagttcccctgcactgggaaggcgatttggttaaaggcgtcagacgtaaaaatcaacctgccttaatgacactgactgaaagaaccactcgttttgaggttgttatcaaaattcctgactatcgggccagtacttgtcaaagactgcttcaaaaggagattgacagacatcctaattggtttaaatcaattacgtttgacaatggttctgagtttgcggatatgaccaaaatcaaaggatgtcagatctactttgctcatccatattctccttgggaaagaggcacaaatgagaactgcaatggacttctgcgtcaattcttccctaagggcaaaagcatgaaagataagtcagctgcttatgttcaacaggcaactgatgccattaaccgcaaacatcgtcgaatcctccaatatcacacagcagaagaactcttcaagcaatacgttccttcatagcctaactgttgcacttaatttgacaattcaggatcaaataagttataataattttattggtgtgttcaactacatttttatatttttgcactgaaatcttaattcagtgcttttttcataaggattagactaaataagatgataatacgccagcgaaaaaattatttaacttctcaatttttatctaagattagtgccgatgggactttaaatattgaaaatttaattgtcctgacttgtgcaatttttattgcaagtattggactaaatgttaattcaacagctactattattggcgcaatgttgatttctcctctgatgggaccactactagcaattggcacaggtcttgctttatatgatgttcacttactgcgtaaaggaacaatttcattattagcagaaattattatcagtttagctgcatctacaatttattttcatttttctcctttgacttatgctagtcaagagattattgcacgaacttcaccaacaatctgggatgcgatgattgcgttttttggaggggtcgctggaataatcggagctcgcaaaaaagaagcaaataatattgtacctggtgtagcgattgcaacagccttaatgccaccggcttgtacgatagggtattcaattgcggcaggtaatcttaaatattttttaggatcaagctatttatttttgattaactgtgttttcataattttgactgcattcatgggtgtaaaaattatgaagtggttaagttattctactaagcaatctaagttgtttttcttgcacaagccgacctttaaagagtttgtgataattttagtagtaattattttaattattcctagtatcttgtcagctaatcagatggtgaataaaactctagtagatcaaaatgttcaaaatcttgttgttaatgaattaggcaatgttaatttaattaaggaaaatgttgatacgcaaggaaaaataattaatcttacagtttcaggcgataaaattaacgctaagaaaattcaagcggctaaagcaaacttaacaaaatatgacctgaaaggctattcactgaatattgtacaagtagctcaggttaatcccaatgcagaaaatcaattagatcgacaagtaaataatattattaatcagcgtcagcatgaacaagaacaagctgatgaaaaacgtcaacaagaacaagaaaaacgtaatcaaaaaattcgcaaactgtcatctgcaatatcttctgttactgcagttagtgataataaaaataagcaaattactttgatagagttaaaaaagccgctatctaagaagagaaaaaacgccttagtaagacaaataaaagataaatatccaaatattaatttagtggaatttgttcaagaaaatattaaaaattagaagaaactgtcaaattttttgtgtaaatagatttttctcgtagattgattttttaatcttttatttaatcaaagtagaattctaaggtatcctgaacctgaccaaagcctttgtggattcgattgaaatagcgttcgttgtagctcattgcttgaatgccaataaaagtatcaagcgactgttcatttgaaaactctgctttaggtttagctttacgcttgataacgttgttaaaggattcgatcatattggtggagtaaattgaaaccctgatctgcttaggatagctgtaaaagaccagcagatcaggttcaatctctttgagatttctgatgacatggttgtacgctctgttccacttgtcatagaaggcgtgcaagactttgatcgcagcttctttatttggctgttgatggatttgcttgaattcattcatgatattttcgcgatcatctacgcgtactttagcgcagatattgcgcatgacatgtaccagacagcgttgaaaatgagctttgggatatgtcttttccagtaccgtcttcatgcccacaacgccatctgaaagaaagagctcaacctgttctagaccgcgagacttcatgtcttgaagcatttccgtccaattctcgacgttttcgctgggagcaatgcggttaatcgatgacttccttgtggccattaggcttgatgccaatggcaatataaactgcttcacgatcaaaggttatgcgacgcaaagtaatgtaagttgcgtccaaataaatacagaagaacttatcgctaagcttgcgttgatgataggcttcaacttttggaatcatctgcttggagatgttagatacctgagctgggctgtagtgactgccgtacatcttttcaattaaatcggctatttctctggtggttacgcctttggaatatagcttgataatcatgctttccaagacatcggagtgctgcctgtagtcaggcagcgtgtgctgatgaaacatgccgttgcggtccctaggcacctgaatttcaatctcgccaaattgcgtatcaactttacggaaataagcaccattgcgtgaattgcctgtattccagccagctctggcataaggatcatagcctaaaaacgcagtcagttcagcttccaataagtcattaactgcttgctggagttctttgcgcaataaatcgtttattttgtcttgattgaatagagcttgtgccatatttttggtaaaatcattcatgaaggagttcttctttccgtatgtgttttttgttcaaaccaatcatacgagaaaggaactcctttttctaatgtttaaagaaataaatttaaggaatcattcatccttacacaaactattttacggtctctatctagaaactgtcaaatcttttgtgtaaatagttctttctcgtaaattgattttttaatcatttatttaatcaaaataggattctaaggtatcctgaacctgaccaaagcctttatgaattcggttgaaatagcggtcattgtagctcattgcctggatgccaataaatacatcaagcgactgttcagttggaaattctgccttaggcttagctttacgcttgatgacgttgttaaaggattcaatcatgttggttgaataaattgaagctctgatttgtttgggataattgtagaagaccagcagatcgggctcaatttccctcaaacctttgataacatggctataagctttattccattttgcataaaattcatgcaagacagctgcagcttctttttggcttgtctgttgatgtatctgcttgaattcgttcatgatcttttcgcggtcatccacccggactttagcacagatattgcgcatgacatgaaccaagcagcgttgaaaatgagctttaggataagtcctggtcaaggccgctttcatgccaacaacaccatcagaaagaaagagctcaacttgcttcaagcctctggacttcatgttttgaagcatctctgtccagacttcaatgttctcactaggcgcaatgcagtagtcaatgacttctttatgtccattaggtttaatgccaatggcaatatagactgcttcacgctcaaacgtttctcggcgcaaaggaaggtatgtcgcatccaaatagacacagaaaaacttgtcgcttagcttgcgcttgtgataagcctcaaccttggggagcatctgcttggaaatatttgatacttgggctggactataatgactgccatacattttctcaatcaagtcagcgatttctctggtagttacgcctttggagtagagcttgataatcgtgctttccaaaacatcagagtgctgcttgtagtcaggcagcgtgtgctgatgaaactggccgttgcgatctcgaggcacttgcacttcaattggtccaaactgggtatcaaccttgcggaaataagcaccatttctagaattgccagtattccagccatttctggcatagggatcatagcccagaaaggcagtcaattcagcttctagcaagttattaacagcctgttgtagctctttgcgcaataaatcgtttattttgtcttgattgaatagagcttgtgctatattttttgtaaaatcattcatgaaggagttcttctttctgtatgtgtttttttgttcaaaccaatcatacgagaaaggaactcctttttctaatgtttaaagaaataaatttaaggaattattcatccttacacaaaatattttacagtctctttatctagctagctggatttttaatagtgaaaaatggtcattgaaaaaacaaatttttattaatttcttcgtctgttttgttgcctggttcttgttaaacctcctaattgataattttagtatttcactaaagatggttattagagtaacagttgattttattattatgtacgctattgcatacggtggatattttttacatttatggaacactgttagacgaataaatgcaaagttaaaggaaaaatagaataccataattaaaaaatgaaagaggtacccttgcatgactttattatctgtaaataatatttcaaaaacatatcaaaaagcacataaaaaggcggtatctgatgtttcatttaatgttgatagtggtgatattgttgccttcttaggtcctaatggtgcaggaaaaactacaacattaaaaatgattcttaatttagttagtcctgataaaggaacggttgtattcgacggaaaagatgtaactcacaacaatctctttttattgaaaaacactggcgttttattagaaggatctagaaatatgtattgggccttatcaccaatggaaaattttgtttattggggtggccaacgtggtttaagcaagaaagaggcagaaaaaagaggagaaactttcctcaaacagtttggtctgttggataagaaatacacctctattaccagattgagtagaggtatgcagcaagttgtgggaatttgctgtgctatgattgccgaaccaaagcttttaattttagatgagccaactttaggtttggatcttaatgctactcaaataatgattaagagtctgaatatgttatccgccaatggagtagggattctagttactacacatcaaatggaatttgctcaagagatagctaataaaattttattaatcaatcatggtaaacttgtcttttctaatagtataaaagatagtttgaagaagctgaataaacaagaaatttttgaagtgcatttcacccaagaacttaccgcctcagaaaaagaggatatacttgcaagctgtgaacttacaaagaagactgacggagtttatcgtttgggtgttaaaccgcaagcatctctttcacaagtacttaaattattgagtgaattaccaataagtagtatacaaactgtgactagaggattagatgaaatttttaagtactacacggagaaggaaaaatgataagttttaaagctgaattttggcgtcaattctatttatataagagatacctcttcaattatatttcagaatttttcttattaattttaatgtttatggctattttttggggcggtagccttgtaggaggtggcgttttaggaaaatcattgaatgccctagtagttggctatgttttgtggagtttaattgaaaacactattagccaaatgggctaagtgtataattttttacggtaagttgaataaataattaaaaaagcccaagtcctttgaatttggacttgagctcaaacaaaaagaccagtagtctgatgttaagaacaaaaaacacattagaagctggtcttttatgaattcaattgtaactgaaatcgcaaatattataaagtctgaagataattatattaagcgtgaaagaaaaataatctgtttcttcttaaacctgattaaggaaatcatggccttggctttagctaaagttgatgatgaaatgattaccaaggttaaagcacagggctatcagattgataagaagaatgagcgctcaatcaatatggcttttggcgaagttaggtatgtcagaagaagatatgtctgcccaggcaaacaagcaaggtatcccttggatgaattaatgggctttgacaaatacaagcgctacagtattttagcagtcaaaaacatcttagaagtaagcagcgttgccacttatcgcaatactgctctagcagtcaattgcctgtctggctttaatattagccatatgcaggtgggcaatttggtaaaaatggccgggaaaaatattaaagcgggccaagaagcagattcaagatatgatgccgcaggcactaagaaaaaggtcccagttttgtatcttgaaggcgatggcgtggtgatcaaaggcactaaaagccggttggaatttcatcgctatcaggtctgtgaaggcattgtcaatataagcaagaaacgcagaaagcgaatcaatgccaaggaatttgtttctttaagccgacttgatgcgctgaacgaagccaaggagtacctggccaatacttatgatctttctgatactgtaattcttagcaacgccgatggcggtgctggatatgccaaaacagacttcgatgacattgtagggctatgcaagcgtcatgagcatttcttggatgtctttcacctaaataagaaaatcaaagaaaggctatattttgcgcctgacctgcaaggcaagctgatttctgctttggaatacaaatacagctatgacaaagttaaaactatcctaaccactgcagaaagccgactaattgatgaattgaataccgagctcaatcatgattatctggggcgcctaaggaattatattgatcgtcattgggacgatattaagccgtttaagaaatgaaaactgactgtgactaaagccattggctgctgcgagagcaaccaccgcaagtatacctaccgtgttaaggggcaaggcaagaaatggtcaaaatctggagcagaaggcatgcttaggatcttaagctgcatcaagaatcgagagctggaattttggcttagcagcgagtttgaagattcagaaataactgtattgactgaacaggaattaaaagcagcggcccgtgacagcttaaagaagcgtcatgaagttcatttaggcatccagcatggcgcattaaccgcacaggtagctggcaatagttatttaagcaagctaagcagaaatttaagtcatataaatatttaagaaattaaggttagactaatggtttaaaggctaccgcaaaaacattgacacttacccaaatgggatcaacagtgatgaataatgccaaaagtggtattttagaacaacaatatcttatgccaatttcttctagaagattatttttaaataaaagtattgcaaatattgttgtggcattcgtccaagcaattttaattctgatagcagtaatggcaatttctgatcactggattagttttccagtaataatgattgttccatttatattagctttactaactacagtgggattaggctatttaattgttagcttagttttacgttttaaaagaattggcagtaccttagtgatttttcaatatatttacttaggtatactactagttaattttgaaaactactccaatcttacaaaatgcttatcttgtttattgccaatttgtccaatggttagttggatgagattagcagttaacaatcgaccatacaatttagcgttttatttaagcgaatctatctttaataccgtattatggttgattattggattgctagtatttaatttagctgataaatatgtaaagaaaaatgggactttatctttttattgattttagttgctaataaattcattcatccctgaaaagtgattcttgcccacaaaaatttcaaggaataacttctacttatgcattgttctgtggtaggaacgctgtaaagtttgtgtctgcagcttgggtaaataataacgatcttcatgtttaaaaatagggcaaaaattgctctatttttagctcccattagaattttccgtggcataattgacgtataaatttgaaagggagatataaaaaatgaagaaaaaagttttatcatttattgccgcttttttagttgttttaggtttggctagcgttcatgcaaacacagcaaatgctgctagttagggtgctaccaaacttttcaccacacctaagaatacgcgtggtgtttggtaacacaaagaagctggtaaagttattagaactaaaattactgcacatactattaacggcctcaaggtttataaggtattaaagggtaaagaagcagataagtgggataaaaagttaactgctgccgatgaaaaggctaactacaaattagctgacaaagtttctagctcacaatttgaagcttatacctttaaattccacggtattacggatttcaacgcaaacggctggcttgctggtagcggcgacggctactactatgctcctatgaagaagaccgttaagggtaagaaagttaatgctttgcgtgtcggcggcggtgctggcaactactttatcagctacgcttacaaggataagaaattagcgtaaattgcaataataaattgaacacttaagctgcttgatagattttgtctaattctctttcaaagatttcatctggtgtgtgatatgccaatagttttcttggcaatgaattacaccaggtttcaatatcaatgatttcttgaagagaatagttattgatgtagtcacctttaggaatgaatctgcgaataaggccattgtgtctttcaacagtgcctttatcacaagaagtatacggatgagcgtaatagactaaagtgttagatactttctctaagttggatagatccgcaaactctgagccattgtcagttgtaatcgttttaaaaatttcattccagtgtttctatattgactgtgcaaggattgaaaagctgacattacactgttagccgttttatccggaatacgtatgatcaagaactctcgactcattcgttcagacaaagttagcagcacttgatcgtctctagtcttatgtcctaagactaggtcacattcccagtggccaaactcttttcggtcttaaatcactttagggcgctcttcaatgcttcgacctagtttctttttgtttttacggacacgatgaattttaatgttacgctttaatttttcgggtaaatcagagtttctgatagccaacaagccttggtctacatagttatacaacgttctagtacagactgtttattcgctgctaaattttcctatagccagacagcgattggcgcatacatcaagcgaccaattattttcaaagaagtgcttaatgacatacttaataaagtcattcttctttaagaaatctgacttgcgaccgcagcggtgacgatccaagtggtaaacttcattaccatgttttgctttatatcgcttttgcttgccattataaagcaaaactgtgccacgcttaacttcataactgatcgtagaaggagaacagccaatttcacgggcaatagctctaagagagaagccatccttgatacgagtttaaataataactcgctcttctagtgataaatactttcccttttcgtgcttaggcatgatagaatgtaaagagtccatttgtgacctcgtttctgaatgttttgtggtaattacattttatcaaacaggtccaaatggactttttatttttctaaagtgttcaatttgattttacaatcggcgaaatagaaaatatgttaattcataagaaaattatttttcaaataaaggcactttcttttgtgatttaacttcaaaaagacctttatcagagatttttagactaggagaaacaagtaaagacaaagtagagaaagacataatttcgtttgtatttttatagcccaattctacgagatttttacgtatattaccaatttgttctcctaaaatcttcattggttgattgcttacaactccaccaattggaagaggagcattggctgcaatcttttcacctctggcgactatataaccaccttgctgattaattaattgatgttgaatgtcaatcatgccatctatatttgttcccattaccatcaaattatggtgatcgtgagcccaggttgcccctacagcaccatcaccaataatgccacgatcaactaggcctaagctaaatttaccatcatttaaaccatatctttcttggacaataattaaagctaaatttgcactttgccaatcaacgatatgattatgtacagctagccttttttgaatatgatttgtaaaagtaccgacaggatttatttgaatgacatttgctgtaactgagccattatcaacaagatttgttttaagtaataggtcttgtttagttaatttaggagctttcacactagtagttagactattaggtgaaaaatcatcttgagaagtatttttgatagtctcttttgcggatattccatttttatagacatcagctattgagagttcttctaaattatccagaatggagaaatcagcaactcttcctggtgcaattgcaccacgatcccataatcccatatgtcttgcaggaatataggtagaaatataaatggcgtcttctggcttcatccccatattgattgcttttttaactaataaatttaagtgaccttttaacaaagtatcaggcattgaatcatcagtaactaaggctacatgttcaaaatatttattatcaataatagtattgatgacatctggatgcatggattttaattgaacttcaacaaacatcccgtttcttatcttttcattgactaaatctctagtttgttgagtatgatcagtagtaacaccggcatataaaattttagctaaatcttcaccatgataagcaggggtatggccttcaattggcatagtaggtttagttttatgacaagtattaattatgtccttaattagagtgtccttgtcagaagtcatatctttaaagttcatgacttcacctaagcaaataaagcgtggatctttaagtaattcttttacttcaggcacaccaattttaccgccagttgtttccatttgaggattggttgaaggaacagaagaagggatgccgaagaaaatatcaattggcgaatcttcattaatgaaatcttttaatccattaataccggcgacattagtaacctcatgatcatcagcaataatagtagtcgtgccatattttagaattgtttcacccattattttaggtgtagtcattgagctatcaatatgcatatgggcatctacaaaaccagggattaaatatttaccttgtagatcgatgactttttttgcttttaaattaggtaattctttattaatccaatagaatttgccatttttaatacttacttgaacatcttgaaattttcgtaaatatacattaaaaacatgagcatttttgataattaagtctacctcagtcatttaaaatcctccataaaagataaggagctgaatctacaattcagctccttatagggaataaacatcaattatttattcataatcttattccatcttgaaatccagttagacatatgtgaatttacaaagaagaaattaatagtttttgctcttttagcaactgagccataagttttgtttgctgcttctgcaggtgttaatttaacttgagtgtttacaggagcgttgttcaaagatttaagacctgctactttcttttgaattttttcgcttaatctaaagttgatgtatttgtatgcagctgctgaatttttactattctttaaaatagagacattatcgtagttagcatatgtaccagacttaggaacgatgtattttaagtttggattagttgcttgaagcataccaacagcataatcaccaactacagcagcttcaatttcaccagatttaaacatgttacttaaatctgaactttgggtgtaagttttgacaacattaggttttaattctttcattgccttaaatgctgcatttccgttgtctttagttacactagtaccagcatagtcaccagcaatatataacattgcggggccaaaagtagttgtcatatcaggtacagcaatcttatttttaagtttagatgaccataagtccttccaagaattaatattaactttctttggattatagataatacccaaactgtttacggtataaggaactgtattagtttctttagctagtttttgttctgattttgataaatatttgaaattggaaatcttagagaagtctaacttcttaaataacttctttttatcgccagtaacagcattgttttgagcaagttcaattacatcaacacctgtattagggttatgttcaatttgagtaagtcttgttgcactatcaccaaattgagtttttactttaactgatgattgtttagcaaaaggatttaaaacatcgttccgcatttgtttggtagataaaccaaaggttgaaacagttaaatttcctccgttagaagatgattgtgatgaacatgcagttgtaccaaatgcaactgaaccaactaataaaaaacttgcagctaataaaccaacttttttaaaattcatttttattcctttctttacaattggttatctagacaacggatgaagatgcttggagggcaaataaagctgaactttatctcctgagctacgcatcgatttcctagactcttcaacagtgaagtctccgagactagtacttaccttatatttaaagctctgacctaaatactcaagactagtgattgttccatcaatcaaattattagacggattttcttctgaattaatcaaaatattttcgggtctaatagttaataccttagcttgaatattattttcatcagttaagaaaacaagatctttacttttaatttggcgatcattaataatttcatcaacattgatgaaattatcataaccgatgaatctagcaacatattctgaactagggtggtgaaagatgttttcaggagtatcatattgatcaattttgccatctttcatgattaatactttatcggaaatagcgaagcattctctttgatcatgagtaacaaaaagaactgtcatttttagcttttgctgcaattctctaatttcgctacgcattttaattcttaattttgcgtctaaattactcaagggttcatccattagtaataattgtggattgactaccaatgcacgtgctaaagaaactctttgttgttgaccaccagataattctttaggatagcgagaagctaatttagacaagccggttatttttaaaatttgatcgactcttttttgaatgtcacttttagacatctttttcatttttaatccgaaagctacattattaaagacggtcatatgtgggaataaagcgtaactttggaaaaccattccaaagtttcttttgtaaactggtacttttccaacatcttcaccatcaactaaaacttgtccgtctgttgctggaattaaacctgctatgattcttaaagtggttgttttaccgcaacctgagggtcctagaatagatactaaatcaccgttttttacggaaaacgaaatatcttttaatactttggttttaccgttatatgattttgctaaatcttttacttctaaaattgccaatttaattgttcctatcagtaagtttatttagaccaactagtttttcagttaaaagcataattaatgctgtaaaaatcattagaactacagaaatagcagaaacagttggatcatagttgttttgtaaatagttcaaaattgctggtggcagcattgtaattgatggtccattcatgaacaatgaaattggaatattattaaatgaattaataaaacacatcataaaggctgctacaatacttgctttaatgttaggtaaaacgattaagaagaatcctttctgaggtgaacatccacaaacccaagctgcttcttcaatatttttatccattagtaacatacttgctgtaactagtcttattacataaggtaggcataataaaaagtgaccaataattagactaggcataacaggtagtctaagagtaacgacagcagcttgatataaggcaaagccaattacaatttctggaattagagtagggcttaagaagaaagagtgaaaccaagacttatgaacgatgttgaatcttgttaaagcataaactgcagggataccaattattaatgccgaaagactagcaataatggcaacgaacaaacttgattcaaatccactgataaaatctggttgctgaaaaatattggcataccaggataaagtaaaacctttaattggtagagaaattgaatcctgattattaaatgaagtaataattactaaaagtagaggaaacatcaataatatcaggataataatagaaataattgctaaagttttatttttacgattaagcattaatattaggtctcctatccaaagaaactgtcaaatcttttgtgtaaatagatctttctcgtaaattgattttttaattatttatttaatcaaagtaggattctaaggtgtcctgaacctgaccaaagcctttatgaattcgattgaaataacggtcattgtagctcattgcctgaatgccaataaaagcatcaagcgactgttcagttggaaactatgccttaggcttagctttgcgcttgatcacattgttaaatgattcaatcatgttagtcgaataaattgaagctctgatctgcttgggatagttataaaagaccagcagatctggttctatgtctttcaagcttctgataacatggctgtaaaccttgccccatttggtatagaagtcatgcaggacagctgtggcttcttctttgtttgtctgttgatgcacctgtttgaattcgttcatgatcttttcacgatcgtcgacgcgtactttagcgcagatattgcgcatgacatgaaccaaacagcgttgaaaatgagctttaggataagtcctggccaaggctgttttcatgccaacaacaccatcagaaagaaaaagctcaacttgctttaagcctcgggatttcatgttttgaagcatatctgtccagacttcaatgttctcgctaggtgcaatgcagtagtcaatgacctccttgtgcccattaggcttgatgccaatggcaatatagactgcttcacgctcaaatgtttctcggcgcaaaggaaggtatgtcgcatccaaatagacgcagaaaaacttgtcgcttagcttgcgtttgtggtaagcctcaacctttggaatcatctgcttggaaatatttgatacctgagctggactgtaatggctgccatacatcttttcaattagatcggctatttccctggtggtcacgcccttggagtaaagcttgataatcatgctttccaagatatccgagtgctgcttgtagtcaggcagcgtgtgctgatgaaattgaccgttgcgatcccgaggcacttgcacttcaattgggccaaattgcgtatcaactttgcggaaataagcaccatttctagagttgccagtattccagccatttctggcatagggatcatagcccagaaaggcggtcaattcagcttctaacaagttattaacagcctgttgtagctctttgcgcaataaatcatttattttgtctggattgaatagagcttgagcaaaatctttggtaaaatcattcatgaaggagttcttctttctgtatgtgtttttttgttcaaaccaatcatacgagaaaggaactcctttttctaatgtttaaagaaataaatttaaggaatcattcatccttacacaaactattttacagtctctatccaaagcgcgacttgcttttctcattaatatcattgataaagcagagataataatcagaactattgcaataacacttgcatttttccagttacctaatgtcatggcttgttggtaaatcaaggtagacattactaaatttttattacctcccaaaatttgtggggtagtatatgctgtcatcgcacctgcaaagaccaaaatgcatcctgttaaaatccctgagactaattgtggtattacaatttttatcaaattaacccatggattggcgcctaatacagcagcagcttcttctgcttcaatgtttagctcagaaatactaccaactaatgaaataatcataatcgggagaaataaataagctgaaccgatgataattgccgtatcagtataaagaatgtttaatggagaattaattaaatgaatagacatcagaaatttatttagaataccgttacgacctaaaataatgatccatgcaaagtttctgacaactgcattcgttaacattggaaaaagaatgataattgttaaaattgatcttactttgctcttttgacgagcaatccaaagtgaaattggaattccaagaattaaaacaatgatcatagtgagtaaagcaattttaaatgttctaccaattacatgaagattgtacgtgttttttagaaattcagtgtataggtgcaaaaatcctttagaatcttgaaatgttggtatagcaatctgaattaatggaaagaatgcaaaaatcaagacactaataaatgccggaaatagcagccaaaaactggattttattttcatattgttcgtattcctccttatcttgtcttagaataatttaaatgtaaaaataagtcaatacaaaatatgaattaaaataataacatttgtgttaattgtatgcgtattgtattatttatgaatataaatagatttatttataaatttatcttcttgaaaatacgaacattaccaaaaaggaagtggagttcttaatgaaaaagccagttattattagtacagatccaggaatagatgacgcagttgcattagcaatatgtcttttttcgcctgcaattgaagttaaaagtattattgcaactaatggcaatgttaatgcgcaacaagctttaataaatatattgaaattggagaaatttttcggtaaaagtattcctgtagtaaaaggggtagagcgttcattagtcaaacaatctattcgagctaaagaaatacatggtaaatcaggaatggacggatatgattttccaaatcctagttttgaattggtggatcatggcatatcaccggttgccatacataaaatagttgcagcttcttctgaaaaagtaactcttattggaattgcaccacttactgattacgctctatatgttcgtttatacccagatgatataaaaaatattaaggaactaattattatgggcggagcaatgggtagaggtaattatggtatctattctgaattcaatattgcatctgatcctgaagctgcaaaaatcatttttgaaagtggattaaaaattagagtagcgcctttagaattaggtgcacaagctaaaattatgcctgaagtaagtaatcaaatacgacagttaggaaaagctggtgatatgttttacgacttatttaagaaatttcgaggtggcagttttcaaactggccttaaaatttatgatgcacttgcagcaggcgtacttttaaatccgcaaatgtttaaatttaaaaatacacatgtagaaattgatgttcaaaccggttatacatatggtgcttcattgatggattttaaaaataagctagatcttccaaataatgctgaaatagcagtgtctgtagatccagaaattttttctaaatggtttgtagaagctttatcaaaaacaagataaaaaagtcaattaattgtcaacaattaattgacggataatggttaagcgagtatactactactagttgagaacaagaagaagcacccgcttctcgcctaagttaagtaaacctctaggctgattgataatttctgttgattaaaggcgggtatgattcttataacccgcctttttcttgtcctcaaattaacacggaggtgaacagttataccaagaagtttaatcttaaacgacagaattcgcgctcgcgaagttcgtttaattgatgaagatggtcagcaagttggtgtgatgagtaaaagtgatgccttacgtcgtgcaagcgatgcaggtcttgacttagctctgatttctccaaatgctaagccacctgtagcacgtatcatggattacgggaagtaccgctttgaacaacaaaagaagcttaaggaagcccgtaagaattccaagacagtcagtgtcaaagaaattcgtttgagtccaactattgaaggtaacgacttcgaaactaaacttaagcacgttcgtaagttcatttctaaagaaggagctaaggttcgcgtctcaattcgttttagaggtcgtgccatcactcacaaggaattaggtcaacaagtacttgaaaaaatggccgaagtaacctcagacattgctaatgtaattagtaagcctaagatggaaggtcgttcaatgttcttgatgcttgcacctaagagtgataaggacaaaaagaaaaagtagttaattggaggaaatagaaatatgccaaagatgaaaacacaccgcgcttctgctaagcgttttaagagaactgcaaatggtggtttaaagcgtcaccacgcatttactggtcaccgtttccacggtaagacaaagaagcaacgtcgtcacttgagaaaagctgctatggtttcaaagagtgatatgaagcgtatcaagcaaatggttgctcaaatgcactaatacttgttcttaattaagacagactatagtaggaggaattttaaatgccaagagttaaaggtggaacagtaacacgtcaacgtcgtaagaagatcatgaagcttgccaagggttaccgtggcgcaaagcacatgcaatttaaggctgcaagcactcaattattcgtttcatacaagtacgcattccgcgaccgtagaagacgtaagagtgaattcagaaagttatggattgctcgtattaacgcagctgcaagacaaaacgacatctcatattctaagttaatgcacggcttgaagttggctggtgttgacatgaaccgtaagatgttagctgatattgcttacaacgactcaaagacttttgcacaattagcagaaactgctaagaaagctttgaactaataacaaaagaaataagctagggaaattttcctagcttatttttttatctatttttgaattaatgctcgtaatctaattttttcatctggcgtagtaaaggccgcgtcaaccgcgttgagataaagagtggtttcttcttcaggagtcaaggcggtcttttcttcaagcagttggtattcatgcggtaaattggtattggaaacgatcatatcatcagaatttagcgtgactttcattcccatgtgcaataatttttttattgggtaagaatcaatctgatcaaaagctttggtgttcatatttgaagtggcgcaacattccaatatgatttggtgatcaatcagatattgggtaagtgctggatcttcagtgcagcgaatgccatggccgatccgtttcgcgccaatttttaatgcttgacggattgaatcaggtcccgcagcctcaccagcatggatggtataaggaaggtgtaattcttgggcacgattgaaaaaatgctggtagttaatgtgagggatcgggccttccgcaccagctaggtcaaggccaacaacgccatgacctaaaaattctttcgctagctcaaccgtttccatgttttctttttcattgtgggcgaagcgcatcaaacagagaattaaaccagcgtgtaattcaggctgatctttgtctgctttttgtttttgataaaacttcgtaataccgctgactgctgcagcgattacttgtctttgcgttaaaccatttttagtatgtaattgcggtgcaaagcggatctcggcgtagactagaccttgttgttttaattcgcaaagaagatcaaacacaatcatctccagatcatgctttgtcttcattaactggttaggtaagtcaaacttttccaaaaattgttccaagctagcgcaagaattatcaactgacaattcttgccgcaatttttgatcagttaactgtggcatgtgatgttcctgcattaacttcttaacagtagcaactgggacagaaccgtcgaggtgaaggtgtaaatcgatgaattttctcatggtgatcctttctgttgattgatgattttgcttaaattgtttagtattgtaacactttttcatcagaaaaaaacaaaaatttctaaagcaaacccatttttgatatgatataaggtgataaaaaatggaggaaattaacagttaaaagatagacaagatacaaagatctgttcagaaatataaaacatagaagcaggtcaaaaactaaaaatttaatattttgttcgcttgtatttatttcactctttgctaaatttatgtttgtattggaggtgaaacaaatgatcaaggctcaagtagtcgaattaaaacctaacaagaccatgcaacaagagctggataagctttgtgattatcgcagatattgctggaatcaagctttagccacttggcaagacatgtatgaagcacgaaccttagataaggataataatcccagtccaaatgagcgcagaatacgtgatgagctagtcgataataaggcagactggcagtttgctctgtctgctagatgcttgcaattagcagtcaaagatttggctaatgcttggaagaatttctttgataaggcacagcctgattgggggaaaccacatttcaaatcaaagaaggccccgcgacaaggctttaagactgaccgggctaaagtggttaatggtaagctacgcttagacaagcccagaggcattaaaacctggttcgatattccaacatatgaagctttaaaaatgaagcaaattaaagttgctagtgtctttagagaaagaggacattattatgccgctctttcttatgaagaagaaactttggtaaagcctagaacaggtagaaagacagctgttgatgttaatgtgggacatttcaactacactgggggcaaaatcaatgttttgccatcaagattgcaaaaactatacaagcgcattaagcattatcagagaatgctggctaagaaaagacgggctaatggcaagttagctggccaaagcaataattacgtgcaagtgagaaccaaactgcaacgtgattatcgtaaagtagccaacattcaaaacgatcttttgcaaaaattcactacaaaattggttaataattatgatcaaatagtgattgaagacctagccgttaaacaaatgatgatgacgcacgtcgcttcaaaaggcatgcagagatcattattcagtaagtttagacagatattgacttataaatgtgagtggtatggcaaagaattaatcttggctgataaaacatatccatcaacccaaagatgtgctaattgtggttatgttaaaaaaggtgatgaaaaaatcactttgcaaggcaaccaaaaacatcacactaagcacaatgagtatatttgttatgaatgcggttatactaatgatcgtgatgataatgcagtgttaaatcttttagctttagcaaaataatgaaaacggggctggctaagcccttaagctgcaagagttagtcaatgcgattactcctagattggaatattggaatactaatgatgacagcagtaaataaagcgaagaaaggaaggactatatttctttctgatatgtaaaaaaatatacattcttctacatatttctatgttttatatagcagtgttgatatgctttttagaccaaaatatacaattgatacgatttacaatctggacccccagaagttgaatgaaatggacattaaggcggttttttcagacctagataatacattgctcgcctggaataaatttgaaactgccaaagaaatggataattttaatcaaaagttagccaaggcgggaatcactctcgtggtcatttctaacaataatgctcaaagagtgggcaaggtacttgatccttaccatatcgaatttgtcgctaagtcacgtaagccattgccatttgcgatcaccaagaagcgcgaagcaatgcatttgcaaaaagatcaggttatgatggttggcgaccaactaatcactgacatgcaagcagggaatttggccggcgtgaagactgttctagttaagccattagttgaaactgataagtggaatacgagaatcaatcgtttctttgaaaaaattatctttttcttcctgggtttatcacatcgagtaacatttaagaaggagctatcaaatggatgaggatattatttgtatcggctgcggtgccaagctgcaatccgatgatcctgaaaaagcaggttatctgccaaaaagtgcactagataaggcaaagcaagaagaaaatgcggatgtttattgtcaacgttgcttcagattgcgccattataacgaaatcatgccagttgatttgaacaacgatgattttttagctttgcttaactctttaggacaaaagaaagctttaattgttaatgtagttgacttatttgatttttcaaattctttgctatcatcattgaagcgttttgttggaaataatgattttattttagttggtaataaatttgatctatttcctaaaaactctaagcaaagtaagattaaggattggatgagacaagaagctaaccgaatggggctttatcctaaggaaatcttcttggtttcagctaaaaagaagttgaacttggaagatttgatcgcttatattaataagcaatcgcaagacaaagatgtctattttgtagggacaactaatgttggtaagtcaactttaatcaatgccattattgacatgatgggtgatattcaagacctgatcaccgcttcacgctttcctggaactactttagacaaaattgaaattcctctagaaaatggtcactttttgattgatacgcccgggatcatgaccgagaatcaattggctacgcacttaaatgctaaggatttggagctggtctcacctaagaagcctttaaagccagctacttaccaattattgcctggtaatactttattcttagctggtttgggacggattgattatctcaagggcgaatcgactagctttactgtttacgttgctcgtggaatgtatattcaccgtactaagacagctaatgcggatgacttttataaaaagcataaaggtgaattgttatccccaccagctgcagatgatgaaatggcaccactaaagggtcaagaatttagaacggaatataagagtgaccttttatttggtggaattggttttgtgactgtacccaagggatgcgttgttaagacttacacaccagatgggattggtttaggtattcgtcgtgcattgatttagaggtttgcatatggttaatccaaaatgtattgaaaaaatgccaactgctaaagttgaagcagaattggaacaagaacaaggtaaaggtcgtcagattgggattatgggtggtacctttaatccggtgcatattgcgcacttggtagcggcagagcaagcaatgactaagttgaagctggatgaggtctggtttattccggataatattccaccgcataaaaatgctccgctgacttctgctaaagatcgggcaacgatgcttgatttagctacgcgcgataatcctaactttagggtaaaactattggaattgttccgaggcggcgtttcttatactgtggatactatgcgttatctcaaggaaaaagcacctcagaatgactattatttgattatgggcagtgatcaggttaacagtttccatacttggaaggaagctccgaccctggctaaactagtaacattggtcggaattcgtcgtccaggttatccacaagatccgcaatatcccatgatttgggttgacgcaccagatattcgcctaagttcgactgctattcgtcgcagtgtcgcaactggcacttcaattcgttacttggtaccagaagccgtcagagaatatattgaagaaaaggggctttaccttgacgaaactaatttttaaaaatacttattcaccattctctagtgaacaaattgttgctaaagaaaaggcaaacatgaagaaaaaacgttttgaacattgtgttcgtgttagtgaaactgcacgtaagttggctaagttaaatggatatgatgaagaaaaagcagccttagctggctttgttcatgattatgccaagcaggtaccggtagaagagtatcgtaaggtaattaaggaacaggattttgatccagatttgcttaattggaatcgggccatctggcatggcattgtggggattttctttattgaacgtgatttaaaaattagggatcctgagattttaactgccgtacgtcgtcatacgactggtgatactaagatgactacattagataaaattatctttgtagctgattttattgaacccggacgagattttccaggagttgaagaagcgcgcaaagttgcttatgctagtcttgatgaaggggtaggctatgaattgcagcacaccttagagtttttaattgaaaataaaaataaagtatatcctcgtactttagaagcatacaatgtatggggaattaagtaataaaaaggagaaaaatattgactagtcaagaaattttagattttactacccaagcaattagtgaccgtcatggtgaagatactgaagcttacgatatgcgtggaatcagtattttagctgattactatgttattaccagtgcaggctctaatcgtcaattacatgcgatcgttaactcaattgttgatgcggctcacgaaaacaactacactgactaccgtattgaaggtaccagagattctaactggcttttgctcgatttaggtgatgttgtagtcaacgtctttactaaggaagcacgtgaattttataacttggaaaagctatgggctaacggtaagcaagttgaattgaaggaagattaagcaatgagtgttgttgggattattgcggaatttaatcctttccatagtggacatgagttcttgctaaatcaagcacgcttggttgctggtaatgatccaattgtggtgctcatgtctggtaactacgtgcaacgtggtgagatggcgattatgagcaagtgggagcgggctaaggtggctttgcaatctggtgccgatttggtatttgaaacaccattttcaacggcagtagaaccagctgatctttttgctctcggaaacattgaacaacttgctaaattaggcgtaactgatttagtctttggtgtagaagatgctaacctgaattttgcttatttgggtaaaagaattgcggaaattccccagaatcacatggattttagagattatagccaaacttattcaacacaatacaaccaaatggtagcgcatgaagtaggctatgaagttaatcagccaaatgctattttggggttagcgtattcagtagctaatcataatttaggttcaccattaaatctgcatccggtcaaccgaattggagcaggacatgatgaccttttacaaagagaaaaagttgtccaaagtgctagtgcgattcgaaatttattattgcatggtgaagatacaaaaaatttaaagtattggatgcctaaagcagaagcaatggtgttagctgagcagaaaatttatcctaattggaatttgctatatccatttttgaagtatcaaattgaatcatcttcagttgaagaattgcgtcatatttatcaaatgagcgaagggcttgaatataagatgaaacaagagattcatttagcccgcgattttacagaatttttgcggcatatcaagtccaagcgttatacttattcccgtttgcgccgtttgagcttatatactttgcttaatgtcactcaggatgatatattggctagctttaatcatgagtctttgatgctcttaggctttagtaaggtaggtcgcaaatatttaaagcaacagcgcaaggaatttcagacagaaatcgtctctaaagttgataaaagaagtgctaagaacggctctttagctttacaagttagggtagaccgtttatttgaacaaataatgggcgttgatcaaaactttggtcgacggccaatcgaggtgtaaaaatgttagaacttagtttttctaggattcaaaattccaaggaaccattaactcacattgaacgtgatttggaaatgcgtccagaattttttaagcgtagtaaagatctactaattgatgcgaaaaatgtaaaagtgagcggtgacttgttctatcaagaaccatttgtgactggcagttttcatgtggccgctgatctggttgtgccatcaagcagaagccttaagccggtaaactatcatgaagattttacttttactgaaaactaccttgatcgtaagccaaccaaggaagaattggaagaaaacgatactattgtacaagttgagaatgaccaaattgacttgcaaacagcggtagaagataatattttactccatattccaactactattttgactcctgaagaaaaagaaaagaatattttcccagagggtcaaggttgggaagttgtttctgaaacctcttttgaagaaggcaagaagaaccaagttaacccagcttttgctaaattgaaggtcttgcttgatgggcaagataatgataaggacaataaaaataagtaataaatgtaattgaaaaatatggtggacaatcaaagaaaatttttactttgattgttttttaatcttgtgttagaagcacttttaaagtatcctttaattataaaagcattttttaattaatttattagtattagaaaaccaaattgatctacgaggaaatgaattaacatggcaaaaattctaattattgaagatgaaaagaacttatctcgctttgtcgagcttgaattgcaacatgaaaattacgagactgttgttgagaataatggtcgtaagggattagaagatgcattgagtcaagactttgatgctatcttgcttgacttgatgttacctgatttaaatgggttggaaattgcacgtcgtgttcgtcaagttaagactacgccaattatcatgatgactgcacgtgattcagtgatcgaccgtgtttctggtttggatcatggcgctgacgattatattgttaagccttttgcaattgaagaacttttagctcgtcttcgcgcagtgttacgtcgcgttaaaatcgaaaaggacgcatcaaaggttactgttgctaagcaaaagattgtaaaatttaaagatttgacaattgaaactgctaaccgaattgtgcaccgtggtgatggcaaggcaatcgatttaactaaacgcgaatacaacttattaatgaccttgattgaaaataagaacaacgtagttagtcgtgatcaattattaaacaagatctggggtccagaatctaatatcgaaactaacgtagttgaagtttatgtacgttatttacgtaataagattgacgctccaggtcaaccatcttacattaagacggttcgtggtaccggttatatggtaagagatgaagatgatgatcaagaataaagacgaggaaaaagaggccaagcactcatccctaattgtgcgatgggttagtatcgttgcattaacgattacggtctcttttgtcatattttcagttgttgcctatcaaattgttagtcatcaatcgatggaacagcaacaagagacatctaataatgtagttaccacgatggaccggacattaagttctattcaagatgagctagagatctcaaatgtaattcctgctctgtcaccgtctaccaggcgtattttgaggggcggtcctgctattagcaaaaaagatacagagaataaagcatttagtgatagcctgatttcatcgatttcgaatccagatattaatgtagcagtttacaacaaacatgatgaaattgtttttactaatggtaattctgcacctaagctaaaagaatttgccggcaaccaacttgaagaagtagtaaaccgaaaaaaaggcaaaatgcttttaacctaccagaaaatctattctgaggtaaatggcaaattaactggctatgtagtggtttctaatagtatgacttattacaatagcttgatgagtaatttgcttcattggatggtaattatttcactgattgcaataattatcttcattgcaatttcttatattttggttgttaatgtagttcggccaattaagacgatgtctaaggtggctaaggaagttaatgctgatcctaatagtgaggctagaattaaggaactacatcgagatgatgagttagaagaattagctacttcgattaatcaaatgctagaccggatgcaaggttacattgagcaacaaaagcaatttgttggtgatgtctcacatgaattaaggacaccagtggcagtaattgaagggcatttgaacctgcttgaaagatggggcaaggatgatccgcagattttggatgaatcaattaaggcttcgttgcaagaagctgatcggatgaaacatttaattcaggaaatgcttgatttaactcgagccgagcaaatcgatgttcaatatccgtatgaagtaagtgatgttaatgaaatcatccgcagagtggtcgctgatatggcaatggttcatcctgacttcaagattcagctggatgaggatgatttacctgatgatacagagattcaaatgtatcacggtcatttggaacagttgctagtaattttgatcgataatgggattaaatattcgactgatcgcaagcagattaatgtttcagctggtgtaactaagaagaatgttaatattattgtgcaagactttggtgaggggatttctgaagaagatcaaaagaaaatcttcaatcgcttctatcgtgtggataaggctagaacccgtgaaaaaggtggcaatggtttaggtctatcgattgcacaaaaattagttgctagttataacggaacaattagtgttgaatctgttgagggtcagggcagccagtttaaattgaagttccctcggttgactaagaaaaaagccgctaagttaagaaaattaaatgagaagaaacaaatgcctaagagcaatcttgaggcataaacaaaatcctattaaatcaaggtttgggtaccaagatttaataggactttttttctctagaggcttaggtattagaaaataagaaataaaatgcttcgaaaataattataattgttcccggatttaaaattgaagtgcaacactaagtgttaaacaaaaaggccatgaagacctaaacttgaagtgacgaaaaatcaagaaaggaagatcttcatgaccaattcaaattctagcatttctaagcactatcatcaattaaccagcgtacaacgtggacaaattcaagcaatgctggattccggcataacttcccgtactgttatcgctcaagaagttggctgccataagtcgacaatcagtcgcgaaatcaaacgcggaagcgtcctgcaaagagacagcagctatttattgtatgagcactattacgctgatactgcacagatttattatgagaagcgtcgcaaaaactgctatcagcgcaatccattgaagcattatgctgtctttttgagaatgctctccagacgctttaaagctaaatttgatgccaccagcatcgatgagttcgttggtgaattccaaaggactatgccaggctacccttgtcccagcacaccaaccgtctatcgctatattgatcagggcttgctggacataagcaatattgatctgcctatgaagctcaaaagacgcaggaacaagcgtcatcacagccatggcggtcacgctttgcacaagaagcatcttggcaattccattgaacagcgtcctaaggaggttgaagacagaaaagctccgctgcactgggaaggagatctggttaaaggcgtcagacgcaagaatcagcctgctttaatgactttgactgaaagaaccacacgctttgaagtagttatcaagattcctgactatcgggcaagcacatgccaaaggctgcttcaaaaggagattgacagacatcctgcctggtttaaatcaatcacgtttgacaatggctctgagtttgcggatatgaccaagatcaagggctgccagatttactttgctcacccatattctccatgggaaaggggcaccaatgagaactgcaatggtcttttgcgtcaattcttccctaagggcaagagcatgaaagacaagtcaaaagcttatgttcaacaggcaactgatgccattaaccacaaatatcgccgaatcctccaatatcacacagcagaggaactcttcaagcaatatatctcttcataacctaactgttgcacttaatttgacaattcaggaattataattgttattaatttaagcgatttaattagctaaaaatatttaaacttaagtcatgtggtaataagtcaaatgaaaggcgatgatatttgttctttttgatcataaatttgagtatatgaaactaagccttggtaaaggttgatttttttaatgttaaacttttgtttacttttaaatttagaccaatttttgaaattaagacctcggtgtcctgtacagtttgtcatctttgagcaatttaaagataactcgtactaattttcttgcagttaatgtgcaagcacgtttatgcggcgagtagacagcttcatcatacttcttttggtaatattttttgaaaacaggatcatgtaatcttgctagattggcagcttcaatcaagtaatatcttagatatctgtttccagtcctggccattggagtatgttcgttgctgtgatctcccgattgatattgattccaggttaggccggcatacttagccagctgttcttctttatcaaagcgatcgatacttccgatctcagcgataataccagctgtataggttttgccaataccgggaattgattccagaattttgctttctggtaatgcatcaacgatacgatcaattgctttttctagatctttaatagattcattaaagctttgaatcatgttgtaatgaacagaaagcactgcatcaattgaatcagtcattactttgcctaagcgatatgaacctctaacagctttcttaattgctttagccaaggtatctggatcggaaaagcgtcctctgcctttaacctgtaagtaagaaattaagtcttcggtaggcatatccgcgatctcatccagagttttactatcggttacaatagacatcattgtagcaccgaaaagaggagtattaatcttatctttatcgacagtgattagtttattaacccgataatataaagcttcaatgaagtgctgtttggtacgagtcagttcttgaactaattcatatctggtacgcgttaaacgctctaaagcaagatagttgtcttgtctggcaatgcttactcgataatgtccaaagcttagatacaaagcaatgtaataagcatcgagaggatcagttttactttcttcaaagactttatgaaacctgctggtttctttggggttaattacatcagtctctacattgagcttttgtaaatcttcgtcattttggaaaaagtaagcaggatgaaaactgtaaatagatgtagcttccatgccaataatgatttgatcatagtgtttattttgagctagatctaaaatttgttttttcagttcactagcaccataaagatcattgacaaagctatcgttaattaagcgtttgttttgatcttctgaatcaagtgcaacgacctgtaaatctttagaactaacatcaataccgacaaataatttcattggaaatggcctcctttctttcaaatttctgatcatagattttgatcttcacatgttaacccctaattacagttcttaagttcaatctcgccagtataagtattcactggttgcttctttgaaagctgcacctaatcccaattgctcaaggactagcaaaaagaagcaatcaatacagcatgtgagttagagcataaaggaactgtctgggtggcagacttataaagcagacaaaactgcaggaggtgataacctagaccagttgaccaaagccaatgacaattagaggctaacatgtgaagatcaaaaagcaaatactaatttgattaattatcacaatatgactaattacaatttatataatacgagggatgtgacataatgaaagaacgcattttttcaaggaaattctggcagaaagtttttaactatcaattgattatctggtttctcttgatgattagttatactttttctcagcggaataatcatttttattttataggggatttgttcaatctagcttttagtacggcgatcatgggattgaacttttacgtgcaatttaaaaaggattccagcaagactaatactcaaattgttcgctggctgaccatagtaatttttcctttcaatttttgccaaatttggcatatcactgggaattttttgctaaaaaacctgccggctatcgagattctattagtattactgctatgggcggtttatattttcttgctagttccaattgcagttgtacatgttggaccgattaaaaattggtttttacgcttgctaactatttactttcttgatattcagtacggtgatgcacaaaatttagcaataaatccagattttcgctggcttcattcacttacctatcaaggtgtaatcgcagctattgctttattaacgatgacttgtttcttagttaaagcttggggctatcacttcaatccaaacttaaaatttattaaaagtccaagctttcagaagaagatcttgctggctttattgatcatggcaaccattgatttgttttacaatgagtttatcaactatgataaagcaatttggacagtattctttggtgttgacattggttcatttaaattctcaattcctaatttaactgcagccattgagcccggaattttggaagaaaccgaacgctatttattgatcgtaatttttttagctggttttaatagatttccaaagtatcgcatccctgttgcaatctatggttcagcaattttgtttggccttagtcatttaagtaatttttgctggcatggagaaagttttactgcaacaattgcacaagttattggcgtaatggggagcgcctttatctgggcagaattgtatctctatacaggaaaactatggttgccgatgatctatcactttttaatggattatatttctgatttgcaatctggttggaattctgctggctggtcttggaatggcgaaatcactgattatatttatactgtattaattgttggcgttccattgctattctcaattttgatgcttttcggtaaaagaaggcaagtaatggaagataatgcagatttgattttgaatctaaacggtaggcaaagcatgatttatcagtgacttatattaaagggactataatgtatatgcaagggtaaaataattaagagaggtcataaattatgaaacttaagagaattgtattaagtattgtggctggaactgcgctttttgttcctgcagctttagcgggtcaaaatcaattaacaccggtagttcgggcaagtactctgaagaataagattacaactgttaagagctataccaatccaactttgtataataagaatggtaaagagctaggtagccaagatcggataaattttaagaaaccgatcaatttttatggtcaaccaattgttattcagggacccagggtcagtgcttttattaatcttaatgggatgccacaagctattgttaatggtgaaacctatgcagatttaggtgatggtggttatgtcaacatgaaatcggttggtagctataactggaataataatgagatcggaattattaaaaacacctatatttacaatagcaagggtaatcgtttatcaacttatcgcggtggcaaggcttatttaactaaaggtagcaagattaaatatgctggtaaaagttggactacttatcctgattcatattttaatttaggtgatgggacgtatttaaagtctaataacgttaataccatgaatggcaaaggcgttttgaagctgaatgctaacactgctatttacaataagaatggtaagcgtattagctttaatggacaacaggtttttcctaaatactcaattataaattatgctggtaagcgtcgcactaagacacaaactgacgattactattacacaaacttaagtggtagtaaatcatatgcaattaagaattataagattaaaggtcaagactattattacattggcagaggtgcttatatcaaggcaatgaatgttggtcgcatcaatggcaatccggcatttcgtgatggcggtgcaactacgattgttccgcagacagatttgtacatctataattctaaattaaagaaaactaagcaatccgttaagaaaggacaaaagattagagcggttgatccagttgttctaggcagtggtgatattgcccaactattttacagaattaagggaacatctaactatgtttcctggggtgattatagtgagtatggttttgaagatgatgagcacgtgggctactttaactttcgtgttagattaaatcctgttaaaactattgaaaatgccgctacacgggccgctgaagaatcagattaattgggagtgaagacgttatccatttggatagcgtttttattagattataggaagaggataaaagttcttggtgttgatgtttatacattgctgaatagattagtggtaatactacgatttacgattgttggagagttcgatgaaataggagacagctcaatgattaatgatttactttctgaaattagaatcgatttttggcgtgacatagggttaattattaatgatgaaaagctttttgatcgggtaactgctaattatggctatcatgaaattatgtatcaaaatattgatcattttttcatagaaactaatgacgatgatttcattaaacctaagcgaaaaacaacgtttgaagaaatttatgatttctattgcctagatcaacatataaaaaatgtgatgatgatcagtctgcaattgtttgaacaaagcttcaaagtagcccttgcagaaacagctcttattgagaatggtaaaaatttcaccagaaatcttaatccacgaacaattcatcaaaggcagtttctaaatgaaaaatatcaattaaaagatgggcgagtaattcaccgcggtgatgtgaaagcgcgcatgcggcatattaagcaaaactatcttgagccatatgagggatatactgaggctcatggtgaagcagggatcggactgattattaaagaaatgtcatttggtgttgcaacgaattatttctttttaatgcccatcaaagccaaaaagattgttttaacacgtgtgtttaaagaaaagataactctccgtcaatttgaagaatggctaaatgaaattagatattttcaaagacgagctgcccataacttctcgctgttgattatcaaggaaaaacggcaatttctgtataaattagtactgaataatttgcaccagctggcaaatcaagaaccatgtgaattagctgaggaaagaatcaacaagattgttcaagattatttgacgaagtatccaattgaaaaagattttttgaataaagtttttatggagaaaaaggattaagttgaagttttttataatgatctttcttcaaacaaatgaccataggaacttaaaattctagctaaatcgatccaagtaagactaattgttttggtattatcattgggatgcacaccaactaaattgttttcttccattgctgcttgatcgacaatcaggggaattttattactttgatcattgagcaggctaaatggggaaacagcccctgttttaacttgcagtttttcttctagttcagcttcagtagcgaaggttaaactagaggagagtaattcagctttagctttttgccaatcgatttttttatcttcgggtaacattagtagataataatttttggcgttacgggttttaataaaaagagttttacatttagcaaaatcttcatcttctaagtatttatctgcctttttagttgtaaaaactgctggatgagagaatacttgatagttaatatcatgatcatctaaaagttgtaatatttcttgagtatgcatattttcctcctaataaaaaagtcaggattttcctcctgactgataactatttacgcttttgcttacctttattacggttacgtaagtcttggtgtagttctttcttagcttcagttgtagccttgctttgaccgctattggagttaaacaaagcatccactttttctttagtaacaacagtttcaattggcttatcttttaattcatcggcaatatgcttcttaacactaggtgtaaggacaaaggtaacgattacttgttggacaatcattactaagttaccagcagcccagtaaagagctaaggcaccagagaaggataaactgaagaacaaagtcataattgggttaacaatcatcattgattgcatggtcttcttttgttcttctggaataccaattagtgagatataaccttgaataacggtaaagacagtcgcaataatggctaaaacaacagatttggaacttagagaaataccaaagaatttggattgtgccaattgaggtgaatagaataccgcttgataaattccccacataattggtaactgaataattaatggcaagcagcccattccaccagttaatgaaacttggtttttagagtaaagctctctttgccaagttgataaagtcatttgttggtcaggggtgatccccttgtgtctcattgcattttgaatcaacttcatttgcggttgcagacgagccattttttcctgttgacgtacactcttgttttgctgtactaacatcaatggcatcaagattacacgtacaactaccgtaataatcacgattccccaaccagcaccattatcgccgccaatcatgtgcgcggtttgaatcatgatattttgtaaaggtcggcctaaccattggtaaacccaaccgtaaataccgctgtgcggtgcaacatgtggatcagttgttgccccacaggcacttaatacaagagtagctactgctaataaagccagtactccagcgtatcttttaatttttttcatttaaataaatcaccacttaatttctatctaaaaatgtatgtctctaatataatacatgaaaatcatgcattttttctacacctggaaccgattcttgactaatattttgaatttgggcaaatccagatgcagtaggtagtttttcaataaagcggtcgattttatcactgtctgcttgtaaatagattgtaacggtaccatctgcattatttttaacagtgccaggaatacccatcttgttagctaatgccatggttgaccaacgaaagccaacgccttgaactaagcctgaacaaattaattttcttgtttccatttttatctcccttatttaaattaagttcaactttgattttagcatgatcaaaatagattatcagttataatagattttgaatacaaaaaggagaaaaatatgcaacaaattagttcagttaataatgcaacgattaagaaattagcgaagttaaagcaaaagaaataccgcgatgatgaaggcttatatttaattgaaggctttcacttatttgaagaagcacttaaagctggtaaaaaatatcagtatatcttaggtactgaagaagcacttgatcaagcagatagtgaatatgaagttgatttaagtgggaagaatgtcgtattaattaacaaagcgattgctcgccacttaagttcgactaagaattctcaagaaatttttatggtattaaaaattgatcaaccaaaagaatttccgtttaattatggcaagtgggtgctgcttgataacttggctgatcctggtaatgtggggacgattatcagaactgctgatgctgctggttttgatggggtagttctttcaccagagagtgctgacctgtataatcctaaaacgcaacgtgccatgcaaggaagtcaattccatatcgatttgattaagcgtgatctagctaatgtgatcaccgattttcaggatgcagctattccggtttatgcatcgctgcttgatcgttctgctaagcaattgcctgatttcgaaaaagtgccacaacttgccttaattattgggaacgaggcgcatggcataagcaaaaccattgcttctttggctgatgaaaagctctatattccaattaaaggacaagctgaatcactcaatgccgctgtcgcagccgggattatgatttatcgcttcgcttagcacttgtaattagtaagcggatttactataataatgttagtaatactgaaaaatattttatataatattatttttacagggattatataattatggagggacttacgatgcaagaagttaaagaaaaaaaggatgcagctccttgtaaaccagaagattatgaattgtgctgtcactttgttggtgcttttaagattattggcaaaaagtggaatggtttaattattagttcactttgtgatacccaagatatgcgttttaaagatttagcacgaacgattgaggcatgtagtgatcgagtactcgttgaacgtttgaaggaactagaaaaagaagatatcgtcaagcgtagtgttgatcaaaataccggcatcatttcatatggtttaactaaaaaaggtgctgaacttaagccagtttttgaccaagtacataattgggctgacaaatgggcttagggtattgacattaagtaagaaaaaaagtatattacttaatgtaagttgcttatttaaaataagacaagatgaaaggagtacgaaaatggaatttttaagtataagaaatgttaatactgactgttgttcttgtgtatctaacattgcttttaatactcaagaattcagtttgcgtatgcctaaatagctttaattagaaaataaggagatttacgtcaactgaagtagcgtagatctttttttattgtttaaagagacctatgagagtgggtctcttttttgtgtgattgggggatttttaatgaattggacaattatccaacaagccttgcctgtgtttgctcggggatttgagctaacgttatggctttcactagttggcattgtgggctcaattattgtggggattattgtcagtctggtgcaatactttaaggtgcctgtattaagccaaattttgacagtatatgttgaattagctagaaatacaccgcttttaattcaacttttctttttatattatgcctttccagtaattggcttaaaaatgtccgctgaggtctgcagcatcattggcttaatctttttaggtggagcatatatggctgaaggctttaccggtggttttaatggcgtaagccctagtcagattaatagcggtaaagcattaggaatgaacaacttacaattagctcgctatgtggtttttccacaaggatttagcctaagcatgccggctttaaccgccaatattatttttttaattaaggaaacttcgattttttcagtaattgcaattccggagttaactaatacagcccttgacttgattgggatgtattaccattcaaatgaatatttattgatgctggtaattgcttatgcgattattttgattccaattattttattattaacttggcttgagaggagagtacggtatgcttcattcggggattaatgttttgtttgaaggaagtaactttgcccgtttgatggcagggctatggacctcgatttggattgcagctttgtcactagtaattggcttggctgtaggaacaatttttggtattttgagaaccttaaaaaatcgtccattgcgttttgttttgcggttgtacttagaattcttcagaattgtgccaaccgtagttttactgtatttggtttattatattttgccaagaagcttgcacgtcaattggccagctacttggatggcggtattagctttctcaatgtgggtagctgctgagtttagcgatattgttcgtggtgcattggaatcagtacccaaaacgcagcgtgaatctggcctagcactgggtctaaatcgcctgcaactgttccgttatgtcttgttgcctcaagcagttaagttagaactaccagcaacaatcaacttggctactagagtaattaagaccacttctttattaatgattatcaatatcatggaagtaatcaatgtcggtcaacaaatcattgaagcaaataatcaacaatatccagctggtgtgttttgggtatatggctttatctttatcttgtattttattttggattatcccttgtctgcatgggcaaaacgattaactgctaagaattaggtgaatgaaatgacagaagaagttttaagagtagagcatttaaataaattttatggcaagcatcaaactttgtttgatatcaactttagcttaaataaaggcgaggtattgaccttattgggaccttctggttcaggaaaaagtactttgctgagaacggtgaatgggcttgaagaatatgagggtggcgcaatttattttcacggtaaaaaaataaatcctagtccgaaggaatggcaattgttgcgccaaaagattgggatggtctttcaaagttatgacttatttcccaacttatccgtgatggaaaatattttattggcaccggtaaaagttcaaaaacgtgatgaagctgaagttaaacaagaagcagttaagttattagagcaagtcggtttagctaattatgcaaaagtatatccgcgtgaattatcagctggacaaaagcaaagaattgcgattgtgcgtgctttgattatgcatcccgaagtaatgctctttgatgagattactgcttcgcttgaccctgaaatggttcgcggcgtgctagatatcatgcaaagattatctgataacgaacatatgacgatgatcattgttacgcatgagatgaacttcgctgcgagaattgccgataaggtgctatttttagaagacggaaaaattttggaagaaacaccaggcaaagaattctttactaaacctcagactaagcgggcacaagaatttttagagagtatggatttttaggtgtgaatgatggcaaaaaagatttttaattggatcatggctgtcctctttgcggtagttgtggtaattgctggttattttggaattacgcgaccaggaattaacggcactgcttcaggcgacagatggaataatgaaaataatgtatcttcaattaaacgtcgtggctatttaagagtggctgtctttggcgatctaccgccttatggctgggttaattcacaaggtaagcgtgttggctatgacgtgcgcctagctcgcagagtggcgaaagatttgggcgtaaaacctaagtttattcaagttaatgccaataattgaattgataccttgaattctaataaggctgatattgttttggctaacttcactttgacaccagagcgtaaaagcgtggctagttggactaagccttatatgaaagtatcggttggggtgatttcccctaagtcagctccgataactagtccaaaacaattgaagggaaaaagcgtgatcgttactaaagggacgacagcagagaactattttactaaacaaaaaggcgtaaacttgcttaagtttgactctaaaactcagcagtttaacgcgattaaaaatggccgtggtgcagcttgggccgatgataattcttatctgtatgcttgggttaagcgaaatcctaagtttactgtcggcattaagacgattggacctaaccagtatatttctggtgcggtaaagaagggcaataagtccttacaaaaatggatggatcgtgaaattaccaaattgaatcgcgaaagcttttttacttacgattataataaagaattgaagccatactttggtaaggaaattaggagactgtcaagaagtttgtgtaaataatctctctcgttgattgacttttttatttatcttttaatcaaaataggattctagggtgtctcgaacttgcccaaatcctttatgaatcctgttaaagtaacggtcattgtaatccattgcctgaactccaataaaggtgtcaagcgactgctcagttggaaattctgttttaggcttggttttccgcttaagcctgttgttaaaggattcaatcatgttagttgagtaaattgaagctctaatagctggcggatagttgtaaaaggttaacagatcaggctcaacctgtctaagatctctaactacgtttttgtaggctttttcccagttttgatagaattcatgcagcacctgtacagccatttctttgtttgactgagtatgaatctgcttgaattcatccagtgcttttttcgatcgtcaacccgcattttggcactgatattacgcatgacgtgtaccaagcagcgttgaaaatgcgctttaggataggactggcagatagcctctttcatgccaactactccgtcagacaagaagagctctacctgttcaaggccgcgactcttgaagcctttgatcattccgttattaatattgcatgattttccaatagctttggttttattcatgatctttttaattggaacagttgacttaatgtcttggactggataccagattctaatttcggagtctgtttctgaaagtgagttatcaaagatttctggagcagttggcctgattagttcaattcaaaaaacatttggaccaggtatagcagctattattgttaacctctttaactatctcggtggcttcatgctagattcgatcagttttggctatttgacttatgttgttaaaggtattgagactacaaataacgagaacaatgataaaaaaaagaagagtatacagcaaaccttatcacaaggtttaaaatttgttttgaaagaacatgatatcaaatggttaattattagttttcttgctgccaatgttggctttcaagtagtaataccgatgttaactttcttattaaaagtacaaacacgtgcttcaataaatgaaattagtatattttttactatctcatcagttgctagtatactgggtaactttgtttatctacactttagtaaaaaaataaagctaggcactcaattaatagttattggattaattattactgtaggattcactattatgctggccattaaatctttattaatatttaccatgggatatgcaatagtatcatttggtagtgtatgggctcaagctaatttctttaccattattcaatctaagacacctgaccaatataaaggcatggtaactgctacttcaacgtctctgacaagaattacaggtccattaatggcaacgctaagtggtatactagtaagaatatctccttccttaatctttttcgtagctattgtatgcttagttttatctgtattaataactctgattagtggtttacagcaattagataagctagccaattaaaacgaaatcataatccatatacagattacttatgtaaccgtaaattctgatcttataggtggaacataagctaaagaaaagaagattatgagatggaatagctactagaatgttgtgttgttttataaatttaaaaataagtgcagtcttctttatatctatttgtgagagatctttataaataaaaaacaaattattttttatgaaatatttatcttcctaaaattcaaaaaatatgagatataaacagtatctttacaaaaagcttgcaagaaacaggtaaaagaaatatcatattaattaattactgagatcaagactagtagcagatattttttctgaacagagagtcttctttcaaaagctgcaagagaagatagaaagaacgctgtgaatttcatcttgggagtaggatctaatcaattccggtatttcaccgttaacgaaaacttaagtgtgggcgttgctacgtccaaactagggtggtaccgcgatgcttcgtccctattggggacggggcttttttgttttgaaaggaaagatttaatggacttatttgataagttaaaagagctccatgaagaagggcttaagcaaatcaacaaggctaaagacgaaaaaactttgaatgatgtcagagttgaacttgttggtcgtaagggcgaattaactaagattttgcactcaatgcgtgaagttgcgccagaaaatagacgtgaagttggtcaaaaggttaacgaattacgtgacttgtttaatgctcaattagatgaagctaaagaaaacattgttcatgcaatgttagttaagaagcttgaagatgaaaagattgatgttactttgccaggtcgtgaagcacatcttggttcaaagcacccaatcaacattattttagatgatcttgaaagctactttattggtatgggctatcaagtagttcaaggtccagaaattgaaactgatcactactgctttgaaatgatgaatatccctaaggatcacccagctcgtgacatgcaagctactttctacattgatgatgaagatttgcttagaagtcagacctcaggtgatcaagctagagtcctagaaaagcacgacttctcaaagggtccacttaagatggtgggaccaggtaaggtataccgccgtgatgacgatgatgcgactcactcacaccaattcatgcaaatggaaggtttggttattgacaagaacgtaactatgagtgatttaaagggtactttggaattaattgccaagcacgtttttggccaagatcgcgaaacccgtcttcgtccaagttacttcccattcactgaaccatcagttgaaatggatgtatcttgctttaactgtaatggtaaaggctgccctatttgtaagtacactggctggattgaagtattaggtgctggtatggttcaccctaatgttttggaaaatgcaggtgttgactcaagcgtttacggcggttttgccttcggtgttggtcttgatcgtttcgctattttgaaatacggtatcgatgatattcgtgacttctacaccaatgacgtacgtttcttagaacaattccgtaaggaggaaagataattaatgttagtttcatacaattggctaaaatattttcttgatttagatggtcaaaatccatacgaattagcagaagaaattactcgtagcggggttgaaattcctgaccgtattcatccaatggatggcttgaagaagttagttgtcggccgtgtccttgattgtgaaggcgttgaaggtactcacttgcacttaactcacgttgatgttggtgaaaacgaacctttgcaaattgtctgtggtgcacctaatgtagctgcaggtgaagatgtgattgttgctcttcatggcgctcgtattgctggcaatgaaaagattaagaagggcaaaatccgtggcatggaaagttacggcatgatctgtggtttacaagaaatcggctttagcgatagcgtggtaccacaagaatttgtcgatggtatttacgtattcccagcagatgccgaagttaaacctggtcaagatgtatatgaagcacttggcatggatgattacattttgaacttcgacattactcctaaccgtgctgatactttaggcatggaaggtgccgcttatgaagtcggtgctattatcgaccaaaagccaaaggttgaagaaaaggttgtcttaaaagaagatggtccagcctggacagattcactcgatgttaaagttgatgaaaagcttacacctaagttttacttacgtaagctcgagaatattaagattcaagactcaccactttggttgcagcgtcgtctttggaatgcaggcattcgtccaattaacaatgtagttgacgttactaactatatcatgctgttaactggtcaaccaatgcatgcttatgacgctaagacttttgctaacggaaagtttgaagtaagacttgctaataagggtgagaagcttactttgcttaatgaaaaagaagttgaccttgaccctaaagatatcatcattaccgatggtaaaaagccagtaatgatggctggtgtcatgggtggacttgattcagaaatcacttcagaaactacagatgtcattcttgaatcagccatctttgatccaactttagtcagaaaggcagcacttcgtcacgctaaccggaccgaagcttcaagtcgctatgaaaaaggcgttaactgggatgccactgaaaaggcaattaacatggcagcgcttttacttagaaatgacgctgacgctactgttgatgaaggtattcttaaggcaactgaccaaaagcgtgaaccagttgtggttaaaactactgcttcatacctcaataaagtattgggcactaagttatcagttgatgaaattgtaaagatttttgaccgtctttgctttaaggtagatgttgatggtgataatttagctgtccatgtaccaaatagaagatgggatatttcaatcccagccgacttagttgaagaagtaggccggctttatggctatgacaaccttgaatctactcaacctgttttgccagaaactcatggtggctactcagaaaaagaagaaatgatgcgccgcatgaaggcaattgttgaaggacaaggcttgatggaagctatttcttactccttgacttcacctgaaaaggccgttcgttacactaaggatccaaaagaattagttgaagttaaatcaccacttaactcaagccgttctgcaatgcgtgagaatttgatgactggattggtagatgctgctagttacaactttgctagaaagcaaacacaattagctttatttgaacaaggcagaacttatgaccatgatggtggtaaattcaacgagcatgaacatttagcagctatttactctggcaatacttttgcggaaaattggcaacatttaacccaaaaggtagacttctactttgttaagggacagttaaccaatttgttcaatgcaattggtattgatcctgaaaaagtggtttatgaggctaaaggcattaaggggatgcacccaactagaactgcaggaatctacattgataagcaatatgttgggatgatcggaatgattgctcacgctgtaacgattgctgataaggcacttcgtggtagcgagctttatggctacgaaattgatctcgatacaattattccaatgttaactaagggcgtaactgcagtgcctgcacctaagttcccagcaattcaacgtgacctttcacttttagttgataagccagttactaaccaagaaattgaaaacgtcattaaatctaatgctggtaagtacttaactgaacttaaggtaatcgatgtttatgctggtgctcacattgatgttggtaagaagagtattgcttacaacttaaccttcttgaacagaaaagatactttaaccgacgatgttgtcaataacgcgatggacaagattgttgctgctcttgaaaatgatcttgcgattaaagttcgttaaaggttgacattattgacgtaaattaatattattgatcagtgcaagataaagaaaattaatttctgaggagttaaaaatatgcctgaaaaatcttatccaatgactgctgaaggtaaagaaaaacttcaagcagaattaaagaacttaaaattagttaagcgtccagaagttattgaacgtatcaaggttgcacgttctttcggtgacttgtcagaaaactccgaatacgatgcagctaaggatgaacaaagtcaccttgaggatagaattgctcaagttgaagaaatgcttaagtatgcacaagttgttgatgcagaaagcgttgatcctaacgtagtttcagttggtaaaacaattacctatactgaagttggtactgatgatccagaaacttacactattgtaggtagtgatgaatcagatccattgaatggcaagatttctaacgattcaccaattgctcaagctttattgggcaaaaagaagggtgaaaccgtatcaattaccactcctggtggcaagtttgacgttgtaattaacgaagttaaagcctaataataaaaagggagggtagctatgactatcttcctttttgtttttttgaaaggattttaaaatgagaacagttggtattattggcatgggccatgttggtgcaaccgttgcctatactttatttacgcacagtatggttgacgaactgattttaattgataaaaatgaagctaaagtaaatgctgaatacaatgacttgcatgatactttggctagaaatgatagctatgttaatgtgcgaaagcaagattgggacggcttagaagatgctgacattattattaccgcttttggtgatattgcggcttcagttaagacaggcgaccgctttggtgagtttgaattaaatgcaagaaatgccaaagaagttggggcagatattaaagaatcaggctttcacggcgttttgatcaatatttctaatccatgtgatgcaattacccaaattttgcaagaaacttctggtttaaagaagaatcgcgtctttggtactggtactttccttgatactgcaagagttcaaagaataattggtgaaaaacttggtcaagatccacgtaacgtagaaggtttcgttttaggtgaacatggttcttcacaatttacagcctggtcaacggtaagagttaacaacaagattgctttccaattgtttggtgatgaagaacaagaaaagattagtgaacaatcaaataagaattcctttattgtggctaagggaaagggctatactagctatgctattgccacttgtgctactcgtttagttcaagcagtctttagcgatgctcatctatattgtcctgtttcagtttataatcctgaatacaagacttatattggttatccagctattattggtcgcgacggcattgaggaagaaattgaattaaagcttacttctgaagaaaaagaaaagttgcaagctgctgcagataagatcaaagaacacttgaagcaattgaagaaataaaaaatagtcattataaaaaaataaggcgagaattacagtcattgtagttctcgtcttatttattgcttattttagttttacatcccaagcggcaatttgcttgttgccgtagtatttcttgtaaatttgcttggtctttttggtctggtatgctttaacaatttcttgataaatctttttatttttatccttagtgcgggcgcaaataatattgatccattgctcagagtctttgttcaatggttcgacaaagatagtttgcttgtcacctagatgtgcagggccagcaaagtcattgttgacgacagcggcatcaacatcatcgatcacgcggctagtttgttcagatgcaacttctttaattttgaagtggttaggattggcagtaatatctgcaacagagaccaatactttgcctttcttcaatttgatcaacccggcatttttcaaaacaaaaagtgctctcgattcattggtgggatcgctggggaccacaattgttgctccttcaggtagtgcatttaggctatgatattttttggaatataagcgaataggtgagatataggttttaccgattgcagtaattccgccatggttggctttgttccaggcgttgaggaaagcatagtgctggaaggcattcagatcaacgtcaccggatttaagtgccttgtcaggttggtcataaccatcaaaacttttagtggttaaaataatcccatatttctgtttgacggtttgagcaacgcttttccagattgcaatgtcacctttgctggcaccaacgattcctacgctaactttggtttgaccgttgctttttggcgtccaaaagaagctgaagtaaccagctacgataatcaataagctaacaatggtgccaataataatattccgctgtcttctttttctcatttttctttctctcatatgcaaaaaaagcacccatcctcaaaggacgagtgcttcgtgttaccacctttatttgccagctatttacataactgacctcaatagctatctaacaatagcttgcattgttaacgagagcaaccccgatactagctaaatatcactagtataatcattctgaatccatcttcattaagtagtttcttttacttctcaccaaccagtaattctctgtaagaaagctagctataattactctattcatcaagattttttaattattgctattaatttatcatctcgttttaattttgtcaaataaatttttttacttagttaaaaagttagtaacggaagaaatagtgagaaaaagtttatttttgtcgattaacaaagtagtaaatgagtgagacaaccgattcagccaacatcccaccggccatccagtacattgccatcatcattttgccggtaaaagtaaagtaggcagtaatggcgtaaacaattacccaaataattttccaaaataagttattcattcctgagcacattttgaagctcctttatttttgactagcaccagaactgctgtcaacttccatgccgcaaccttcggtatccattcctggcatccacacatcttcaggtttaatgcctctttctttagcaaaggcgtcggttaatgtcttcatatccattaacttgtatgtctttgggtgtttagggtcgaatacttcgatttgagccatcattccggcatcttcgtgttcaataatgtggcagtggtacatgaagactccagtttgtgggaattctacacgcaagcggacggtttcacctggtctgacaggaatggtgtctttgtaaccatattcatttggaaatggcttttcgccatcacgtgaaacgactgtaaagtgtgtgccgtgaatatggaatgggtgcaacataccgtgttccttagagttggtattagttacgtcccagtattcagcatgactaacttgttgcttcatatcgatccgctgcattgcgaattgcttgccgtttatcttgttgtgatcatccatagttactttacgaatcggcaaatcttcagcgatttcaggaatttctggtttgaataatgtatcaggaataacactgttgtcaggtgcaaacttgtgaattctaaattcaattagtttgaaatcatcagtataaaggttaacgacatcgccatcatggtaatccttgaagtcaactacaacttgaagccgttcaccaggtgttaccaagatcttagtcattttgattggatgaggcaaaaatgaatcgtcacctgcaatttgagtcataactaggtcatcatcaaagtgcaagcgccattcacgacggttagacccacctaagaatagtaaacgaatcttttgtgttgttacatcaacataagggcgaaccgtgccgttgattaatggtgtttcaccgaagacgcccattgcatcataatcagcgcgatagtcaagttgattatctttgtggaaagtacggtcttgcaaaataactggaaactcgtcaacgccatagtttttaggaattgggagtttagcttcgttttcatctgttactactacgcccatagctaatcccatccaaactggggcagcggtggatggacatgggtgagcatgaagccatgttaaggcagctggttgattaacagtgaattcgatttgcttttcttcacctggataaacaggggcatgacagccaccatcagtaataggaccaggaacttccatgccatgccagtgataagttgttagttctggtaaactattttttaaggtaacgtgaactcgctggccacgttttaagaccatggttttacctaacaaaggagcgttataaccccaagtcttggtcttagctccaggcaatatttggctttcgctttcaattgattcaagagtgaaccagacatcagtatcagtttccttatccagtgcaagaactggagggacagctaatggctgagcttctacaccttgagggatgcttaatttcttgtagtggaagtggtttttgtcaaaatcttcatctttgataaagtaattagtgtatatcttatctgtcatcttattaaccccattcttttgacactaacttagcatgattttttaccgtcttcaaggcgcaagaacgctgttatttaaaggcttgcatgtctattataactatgtaatgaaaaatatttttactattttgtaatcacttatacttaggcggattatgttattttacaagatttgttgccttgctaggcttgcgtgtctccggtaaactaagcatgaagaggtgactagatgtataaaattattgcgtgtgacttagatgaaacgttgttgagcgcagatacgcatgtctcagtagaaaatagagaagcgattcaaaaagcagttgctcacggtgtaaaatttgttcctgcaactggacgaggctacgtttctgtccaaaatactttaaaggaaataggattagagcaggcagctaatgaatatgtgatttcattcaatggtgccagcattacagaaaataagaataatcgcgtgctgtattttgacggcttgcctaatgaaattgcggatcggttatatcggcatggggttgaactagatattgccatgcatgtttacactcaagatatggtatatacgtatcatatcgatgatgatgaacgtgcctatatgacgggacgacaccagtttaaagagattgaagataaagacttgtcatttttggaggggcagaaaattgccaaggtgctctatgagagtcttgataataattatttgcaccggatcgccgctgaattaggaccaattacgcaagaattggatatttcgtattcgtctaatcgctatttggaatttaaccgtaaaggtgtcaataaaggcgcgggactgatgaagctggctgagcaacttagggtgccgattgaagaaacaattgccattggtgataattttaatgacctgtcaatgattcaggctgctggtgtgggtgttggtgtagctaatgtcaatcctgctatgaaagagcaatgcgattacattactcaggctgataataatcatggtgcagttgccgaggcaattgatcattttatttttaacaattgaaaaaaataaaaaaataattgacatattaaaaatacatgatattattgtttacaataaataaaaaaatgagctttgataaggaaagtaacttaagaaatgatttgcagagagtcttcggttggtggaagaagataatgatgaattaagtgaaaatcacctttgagctgaaagtgcgatattagcattttcagggtccgccctctatagcggcgacgtatcgctgattttgatagaatcagccgcacgtgcatgaggtagaatttttgtgagtattattctacgaataaataggtggtaccgcgttgaagacgccctattagatcaattgatctagtagggcgtttttttattatcataagcttgttgttaattttttgacttatgggagagataaaaatgagaaaaacattgaagcacttatttggcacgactgtagtagcacttttaggtgtaagtactttatctgcatgttcatcaagcaaatctggtgctaaagcacctaaacaagaattgacctggatgactacctcagaaatccaaactatggatccttcaaagatggtagatacaactggtagtgaacaggcatctaatgtttttgaagggctcaatagactgaataaagcgggtaaagttgtatctggtgtggctactaaaactaatcagagtaaagatggtttgacctggacttttactttaagaaagaatgctaagtggtctaatggtgatccagtgaccgctgaagattttgtttattctttaagacggacacttgatcctaagacacaatcacaacagcaaaatgagtggtcaaatgtagttaatgcagatgatgttttagctgggaaaaaagctccgtcgactttaggtgttgaagctaagggtaaatatgaattggtagttcacttgaaacatcccgtaccgtattttaaagccttgtcagttggttggaatccgcaaaataaacacgtagtcgaaaagtttggcaaaaaatatggaactgcatctaagtatatggtttacaatggtccgtttgttcaaaaaggctggactggttcaagtcttaactggaagttagaaaagaatgatcaatattgggacaaagataaagttaaattgcagacggttaattatagtgtacaaaagacgccttcaactgattacaatctgtatcaggctaacaaattagatggtgcctatcttgatgttcaggcttcaaagagactgaagggtcaatctggttatacagtctataaactagatagaactgaatacttgactttcaatgtatccaagcatccagaactagctaatgtcgattttagaagagcagtttcaatggcacttaaccgagctcaattggctaaaacagttggtggtgctaataccgtagctcgaacttttgctggaccaaatgaatatgttgatggtaagaattttgaccagtatgttgaaagcaaaaatccagctaataagtatatgaattataaccctgcaggcgctaagaaactttatgatagagcattaaaagaattgggtaagaataagttggcctttaccttaatgggtgacgatgatgacgtttctaaaaaggttttagagtttgtgcaaagccagttagaagatacctttggcaaaaaagttgatgtaactgttagaagcatgccgaagactactagagttaagaaaatgctcaatggtgatttcgaggcagtctttactggattgacttcgggctatttagatcctaattcacaattgcacacaatgatgacaggacaaagttataacttcggtaaatggtctaacaaagattttgacaagtatatgaataattcagataaggaattaaatcctactaagcgattagaagatttgtataatgcagaacgtgttttaactgatcaacaaggattgacgccattattccatgatggtcaagcttggatggttcgaccaagtgttaaaaatgtagaattcttgggtggtaatttcagctttaaggatgcatctgtaagtaataattaggagaaaaataatgactaaaacagcttttgtaaattgtaatttattcgttggtaatgaagataatctagtagataatgcttggtttgtcgttgatgatgaaacaggtaaattgaccgatcaaggtaagggaaaatgcacagcagattttgacaaacaagttgaccttaaagggaaatatgtgatgagcggtttgattaattcacatactcacatggggcttgattctgacttgaagaaaaaatttccgactactgaagcttcgactacttatgcagcactgcgggatctgcgtgaagctttacaaactggtgtgacttatgttcgtagttgtggcacatcctttgatgttgactgtaaattagtgcagatgcgcaagcagtatccttttgaaggtcctcaagtgatgccaactggaatggcaatgtcaattgtcggcggacatggtgatttcaaggtggggttaaatggagagcaaaatgctagtcatttggttaacggtccagaggacatgcgtcgggcagtgcgtgaacagtttgccaagggtgctaaaaatgttaagctgatggcaactggtggaattatgtcattaggtgatgaagttgatgatactgaactttctcttgaagaaatgaagatggcagtagaagaagctcattctaagcatatgacggtttgtgcccatgctgaggggagacgcggtattcattatgcggttgttgcaggagttgattcggtagaacatggtttttatttagatgataatgacttggctttgatgaaaaaacaaggtacatttttgtcaccaacattgactgcaggtcggacaatcgtcgttcatggaaaagatgttgtacctgagttctcataccgcaagatgtgtgcagtagttgatgacttttataatcatgttggacatgcaattaaggaaggggtgaaattggcaatgggtaccgatgcaggaacatacttcaatcgcttttctgatacaccaaatgagttggtggaattagttagagcaggagccacaaattatcaagctttaagagcaggcggcttgggtagtgctgaattgcttaaggttgatcaagaatatggttcacttgaagtgggaaaatatgcggatttcttagttttacgagagaatccattagaaaatgttgctgcagttggtcaaaaagataaacaagtttaccaacatggtttacgtaaattctaaatattttttatcacaaataaagcatcctcgtgagatttttcttgcggggatgcttgtttgtgtagttcaaattaaagtaaacattttactaaattctccagtaaaagcgaataaacataacccaaaatataaaaatagttcttgatttagtatgaattacgatgtagtatttaagccatcaaacgtattactgatgatttgaataagtggagattgaaatgtcaagttttcaagaatactactcagaattacaggaactagcagggtatttactacacaatccagaattaggctataaggagtataaaacttctaaggcagtggaagcagaaattgctaagatttctactaatataaaaatcgaacattattgtaaaacaggacttaaggtaatgtttgataatcattgcccaaaaactattgggattattgcagaattggattcactttatcagccaggtcataaggatgctgaccctgaaacaggagcggcgcaagcttgtggtcactatactcaggtgacaacagccttggctttgataaatgaactgatgaaaaatgatcgtctcaacgagtttggcactaatttggcttttatttttactccagccgaagaatttgtagatcttaattggcgcaaaaagcataagttagctggtgattttacttactttggaggtaagcaggaagccatcaaacttggcgtatttgacgatattgattattgtgtatcagttcatgctataggtgaagattttgagcgtaggactattgaaattaattgtgatttagctggatttaattttcaatactttgacttctttggtaaggcgagtcatgcagcatttgctcctgaagagggggtaaatgcacagagtatagccaccctatttaccactgctttggccttcaaacgtcaacaattaaaaaatccaaatcaaattaggtttaatccagtgatgataggtgataatacagaatcgattaatgtaattcccgatcatgttagcatggggacagatatacgatactttgatgtcgaatatgcacagcaactaatgaagcaattcaatcaagcagcagaaggatgctccctagctttaggcggtaattttaagtcagaaacacaggttggctatttgactttaaggtcgaatagagacatgaatgctttagtaaaaaatgtatttttaaggaatgacaagatttcagaattgattgaaaaccgaggctataccatggcagctggtgatattggtgatgtaagttatctaatgccaactattcagattggatatggtggttggaatggaaccattcatggctctgattttaaattagttgatccagtttttgtactggacatattcccggaatttatctttaacagtgttttagaaatatcaaataatcttaataaaatcaggacttatcgtagaacaaatcaggaatatcttgaacaattaaataaaatgggagcagaaaaatgaaatctttaaaaaattatggtccattaattattttagtgctattgattgacactattgcggaatttatagggatgcaggttttcaaaattggtaaaattgaagtttcaattctaccattagtattcgcagttattttagcgattattatttatttacttccattaaagccgattaagcaactctacaatgataaaagagtaaagtttgctggaaaatatatgattttaataatgttgccactaatggcacgttatggagcaaatgttgcacctaagattaatgaaattttatcagtaggttgggtatttctcattcatgagttaggtaatttaggtacaattttatttggactaccagtagctttattactaggattaagacaagaggccattggctcaacattgggattaggcagagaaggagaactagcctatattagtgaaaaatatacacttgattcaccgaaaggtcgaggagtcctaggtatttacttaattggaacaatttttggttcgattgtcttctcaattttagcaccagttcttttggggatgggctttagttatcaagctgttgcgatgagttctggagtaggatcaagttctatgatgactgcagcttcttcagctttagcagctctggttcctaaacatagtgagacgattctatcatttgcggcagcaagtcagttgttaactagttttattggaacttatattatgtatttcctcgcagttcctttgcaaagattcatgtatgttcacttgactagtttgcttgataaaaagaaagaagtatacccagaacatgattagagaaaataatttttataaattaggtagagatgcattaattttattgcttagtgttagtttagttttatttgttcagtagattaagttagtaaaaaatcctaagagcaccccaattacacctgatacttttgccggcctaggtctattatggctgttttctctgattggcattattatcagtatgttaatgaaacgagttccgtggaagattgttagaggatttcccattctaggctgggtgtctatcgtttcattagttttctgtttgcttagtccatattgtgttcgtgtaattaatgcagtagattttttatcattaactacatcggtattagcctttgccggaatttcagtaactcatagattgaaggatttatcaaagatttcatggaagatcttaattgtggcattatttgtctttttcggtatgtatttcatggatactttgatttctcaaatagctcttaatttgagtggaaaatagaaaaaatatataaagccacgctcaacagcgtggctttttgaagtgtgtcgggcatgacattcatctagtccaatgaaagcttggcgtaccgcaaggtggaccgctctcgccaatcctatccaatatctatttagataaaatggacaaggaattggaacaaagaggcttgcgctttgttcgctatgtcgatgactgcaatatcttcgtcaagagtggtaagtcggctaagcgcgtgatgaagtcaattacatcatggctagaaagaaaactgttcttaaaagttaacactactaaaactaaagtagttagaccaacgaagagcaatttcctaggctttaccttctggaaaacgggcgaaaactggcaagcaaagccgggagacgaccgtaaagccaagctttatgacaagattagagaattgttgagtcgccataaagcagttgctcaacctctatcattagtctttactaagataaatcaagtggtcaaaggctggggtgcaggcgtttttggctttaacgcaaaagaagtcgcaaaaatgtggcaggaggcctttgatactccgacaagcatctccactgtgatttacgctgttattcctggcagaaagaataaagacgtggtagctgattttaaggatatttttgcttaaatagaaattttctctcaaataacaatccaaacaaaaaagacgagccaatgcccgtctttttattttcttgaaataaatttttagttaaaagttagcttttttaacgtaagtgttcttagaaatacgatagaaagtcttgccgtgtaatttaattgcgcgaccataagtgttaacgcggtgacctttcttcaaaactttcttattagcacgcttgccgttcttcttgtagacataagcattgtgcttcagagtccgcttaacggccttagctttcttggcagctgtctttttagcagcagcggcatcagtttgagtcttgtcagatgtagtattggcatctttattagcagtgtcttcagcgaccttacctaaagtaatatcagccttttcgttcatggtcttgcccataacgttaagaccgaattctaagctgccagcgccttctttataagcatctgctgagaaaacatagtcaagggatgagccgtctttagcaacattttcttgcttgccggctacaccattcaatgttaggctagcaaccatcttagacatgtcttgacctttggtcattggtgctttagagccatcaacgtgaataattacttcggtaactttaccgtctttaacattaacttgagcagagttgcccaagaacatagcagcttctgatggggtagtgctgccagttttggtaatagtcatagtgatagtttgcaagtcgctgttttgactagtagcagtagttgcagcaacattagtagcaggttgatcagctgcagacactacagctgatggtgccaaaacactagcgcttgcgagtaaagcaagtgatgttaaaatgattttagtattttttctcataaaagtttcctcccacgaattttagatatcgcttacattataatcaaataaatgttataaatcaatatattttttgttattttatttttttatgagcataataaactgaataaaatatgaaactgtcaaatcttttgtgtaaatagatctttctcgtaaattgattttttaattatttatttaatcaaagtaggattctaaggtgtcctgaacctgaccaaagcctttatgaattcgattgaaataacggtcattgtagctcattgcctgaatgccaataaaagcatcaagcgactgttcagttggaaactctgccttaggcttagctttgcgcttgatcacattgttaaatgattcaatcatgttagtcgaataaattgaagctctgatctgcttgggatagttataaaagaccagcagatctggttctatgtctttcaagcttctgataacatggctgtaaaccttgccccatttggtatagaagtcatgcaggacagctgtggcttcttctttgtttgtctgttgatgcacctgtttgaattcgttcatgatcttttcacgatcgtcgacgcgtactttagcgcagatattgcgcatgacatgaaccaaacagcgttgaaaatgagctttaggataagtcctggccaaggctgttttcatgccaacaacaccatcagaaagaaaaagctcaacttgctttaagcctcgggatttcatgttttgaagcatatctgtccagacttcaatgttctcgctaggtgcaatgcagtagtcaatgacctccttgtgcccattaggcttgatgccaatggcaatatagactgcttcacgctcaaatgtttctcggcgcaaaggaaggtatgtcgcatccaaatagacgcagaaaaacttgtcgcttagcttgcgtttgtggtaagcctcaacctttggaatcatctgcttggaaatatttgatacctgagctggactgtaatggctgccatacatcttttcaattagatcggctatttccctggtggtcacgcccttggagtaaagcttgataatcatgctttccaagatatccgagtgctgcttgtagccaggcagcgtgtgctgatgaaattgaccgttgcgatcccgaggcacttgcacttcaattgggccaaattgcgtatcaactttgcggaaataagcaccatttctagagttgccagtattccagccatttctggcatagggatcatagcccagaaaggcagtcaattcagcttctaacaagttattaacagcctgttgtagctctttgcgcaataaatcatttattttgtctggattgaatagagcttgagcaaaatctttggtaaaatcattcatgaaggagttcttctttctgtatgtgtttttttgttcaaaccaatcatacgagaaaggaactcctttttctaatgtttaaagaaataaatttaaggaatcattcatccttacacaaactattttacagtctctaaaatatcatcttgaaaccgattgcatagttattttaagaactttataatagaaaagactaatagtattaatagtaaaaagaaggatattagaatgaataaaaagttacttaagttaatcgcaagtagttcggtcgcaatgactttaatggcacctggagtggcatttatgcaaactaatccggttgtaatggccgctgaacaaagtcaaaagacagtgggaatgacggtttacaaatacagtaaaaatcaccgcagccatgctaagtcaatggctcaaggttttgtgggagataaggtgcaattaacagttagtcaaaagcatgtgactaagatgacaatccatgtcgatggtaaaaatagtccaatgggcaaggggcaaaacgtaaataagattgtaaaatccctcaagattaatggcgttagcggtaaaaaggaaaatgtttccgccgacaaatctagttttgactttgtttttgcaggaaaagctttcaaaaataatggttgggtcaagatgcaagtcactattgactttggtggtaagatgaccgaacaagcttgggtgaagtatgacaaggttagcggtttaactactagcaagaaaaagaccgacaagaagcaaaagaaggctagtaaaaagagcgtcaaaaaagttagtaagaaaagtacacacggtcagcgcagataaaaaggttcaaaatatcaattatgcggtctataaggcggatcgcagtggcgtttctgcagcaaataatttttacacgcatcatgccaggattgaaaaagtaaagcagggctatgttatgaccttaaaagttgaggtaaagcatgggatggtgaccaaatttcagccggtttcactgggaattggttcaatttcaaacctgcgttttaccaaacaagctggcaaggatatctggacttatcaggtccacttcaagtcgctaaatcagttaaagaagcaggctcaggggagtctgcgcttgagcgtaccaattgccaatattcatgatcgtttgtttaaggtctggtttgcttttggtgtaaaaaatgtggcgcacagttcgactgtaagcaaggcattaaccgaagcaaatagtagcactgattcaagtagtactagtgatgctattactgcagctaatgacgacagtagtaaagatgcaaaaaatgctacaagtagcgctcaaccgcagtcaaagccagttaaaaagcagcagtcttcttcaaactctagtgtaaaacctggggcaaagatgacacccaagaagaaaaagatggcgacgattgcagcggtggaatatccatttttgcctgtgatcgcaggctttttagcatttgatgctgcaattattggtttggccttttacttaagaaataaaattttgaagagaaagaaataatgaaaaatatagctaaaattatctcttttcctttcttgttgctaacttgtttgtttatttttggtgtgactgttagtgcacaaagcgtgagttatcgcacttacaagtatggcacgcatcagacctcgatggctgatggctactatgcgcgtcctgctcaggttgtggtagacgacaatcagtacctggtaacgatgacgattcgcactaagaaagatctaagtccctatccggttcaggtgttaacgattgatggacaagcaccgctaaacgtagtaaaaacgcggcatggcagtgactatgattatcgctatagttttcgcactaataatttaaaacgtgatatttctagtcaaattaaaatagatgtgccacatgtttaccaagcaacacacaatattacttttgcttttgacactacacagttgcctaagttaacaaataaaaaagagcgagcaagtcatgcggaaagtgcgataaaacgcagcgcgccacaggtgaaaaacaagagtgttaagcctaaggagcaattggcacaaaagaagcaagcggcaatagctaacaggcaaatagcgcagaatgcacgcaatcaacgtgctaatcaacaaaggcagcgaaatttttattatgttattttggctggagtgcttagttcgttaattttaattggcgttgctgttttgattgtcgtaaatgccaaggaaagaaaaagtaaatgaaaaaacgtaaaggattaattattggtttaattatatttttagtagcaatcgtcggagtggcaattggtgctaaacgattgattgatcaaaaagttgccaataatgaaaagattgttgccacaagtgcagcgattactgaaatttttgataaattgaacgttaatttagcaggggttccaaagacgcaggctaagttaccagcacgctatcaaaaggtgcccaagattgggagtccaatgaagccaagtgttgaaaagattgcttctttgaatcccactcgtgtctatgcagtctcaactttaaaagatcagtatgatcaatcatttaaagaacaaggcgttaaagttacatatttgaagctggattcagtagctgaccttgaagctacactgagttcattaggcaagcagtattaccggcagagacaggctgattatcagattggcttaatcaaaaaagccgttaaaaaggctaaagcacgtgttcacggtcgtaagcctagagtattgatcttgatgggcttgcctggcgctaattacatgattctaactaatcgatcatatttaggtgatttggtcagaatagctggtggggaaaatatctatcactctgatagtcagatttatttgtcaccaagtaatgactcgctagctactaaaaatccagatgtcattttgcgattagaacatgctttaccaaatgtaactttgccacaatttaagcaagagtttaagaaaaattctgtttggaagacgatgaaagccgtaaagacaggcagagtttatgacctacagcaaccagactttaatgcttcagctaacatgaatgtttctcaagcattgaataaattaagcaactggttgtaccctggaaagtgatcaaaatgaagaaaaaggtaatttggataaacttgattttagcagttttgttaatcagtacgattttctttgcattaactcacggagcaagcaatttttcaatgcaaaagatgactaacagccaattgaatattttgtttaatatccgtgtcccgcggattatttcggcactagtagcaggagctagcctctctgttagtggtgccttttttcaggcaactttgcgcaatccgattgcagaacctggaattatggggatctctagtgcagccagtttatgtcaattgctagcggttattattttgccagaaattttctttggtaaaattattttcgcgattattggcggactgctagcgtttgggcttcttttattattccaaaaaaagatgacgccttatcagttaattatcatcggagtggcattgaatgcagtgttcacggggatgcaggaagttttcactaatagtcaaaatagtggcagcagcctggccacaagtagttggggatcgacgatgtatttattgattattggcgtagtagggctgattttcgcgatttgttttatgaattgggctaattacttgaaggtcaatgatgaagagctgacgtctttaggtgtttctgctaaaaccctgcgtttagtcttgatgctaattgcagtggttttggccgcaacaacaacggcttgcattggtgttttagcttttatcggaattattgtgccacaggttgctcgtttgcttttgggatatgattatcaaaaaatcattccattttcgatttttgctggagcttggtttttattgttcgttgacaccatcggccgggtgattacagcaccgaatgagattgcggctaatattattttggctattgttggtggtccagttatgattttaattttatggaagaggcagaaaaatgcttaaagcgtcgcagattgatttttcatatgggtcaaaacaattatttaatcaattctctctgagcctgcaggagcaccagattacgactttaattggtcctaatggatctggcaagtcaaccttgtttcgcttgcttacacgggcaataaggccgtctgcggggacaattacgctagatgggcaagatatctggcagctagctgcgaaggattttgccaaaaaggtagcaattgtccaccagcagaatcaattgtatgatcagataactgtcaaggaactggttaaaatggggcgtctgccgtatcattccttgatgggggatgaagaaaatggatctgctcgccttcaacagattatgcaggagctagagattgctgatttggcagataagtttatagcgcaattatctggcggtcagcagcagcgtgtgtggcttgctacagcactggcgcaagagccggaatatctttttctagatgaaccaacaacatacttggatttgcattttcagtatcgctttttggatttagtgaaaaaattgaatcgaaagcagaatttgacgatttgcatgattttgcacgatttgaatcaggctttgcaatatagtaatcaggtaattttgctcaaccaaggcaggattcaaaagcagggcaggccagaagaggtaattacggcgcagacgattaggcaaaactttggcatagattgcgagatgatcgaaactgagcagggaaaagtcttgttaatggcaggttctgaggcaaaataaaagaccacgagaaaactcgcggtcttttttgtaataataaattattacttgttaacttcatccttgaagctcttacctggcttgaatgctggaacgtttgatgcagcaatttcaatttccttaccagtttgtgggttacgacccttacgagcagcacggtgacgaagttcgaaggcaccgaagccaactaattgtaccttgttgccttcagcaacattgctcttaacaacgtcgatgtaagcgtccaaaatagtgttaatgtctgtcttagtagcatcagtctttgcagcgatttgatctactaattgtttcttagaaatagtttccatgaaaaatacctcttttaatataaactacgattacttattttaacagtaatccgcgtatttacaaggggaaacagcctctttaaagaatttttttaaaaaggaaagaaattctatgtatttgaagcgaaaaatattgtattcgctatcaaaaatgtagttcatgtaatgattcttttgttttgatttgaaaaattaacttttttcaaaaaatttagacattttttgcgtaataaatgatgggagacaagcctaaattttgaattccaaattttgtacagtgatggaatatataagagaggtgaataatctttaattacacaaaccacatcctcgaaatatgcttaaacaatatcaattaagaacgttgaagaatggattaagaatggcaggtataagactatgagcctactaacttataaaggttaccaaggtacttatcgaagttgaaaatgatactttatttggcgaagtcttaggtctagaaaatacttttatttcttatgaaggaaattctctggcagagttgaagaaagatttcaaagcgggtattgatgattatcttgagaattgtcaattgaatcatgagcaaccagaacaggctaaccaagatgcagctaagttacagttgcaaaaattattattaacatcattagcgtgattggaacaaaataaagctcgaaacttctacaaattgtagtaacttcgagctctgcattaatctgtttttgttcaatacaacgcatgctattacatattggcaaatcgatctagttcatcatgtgttcctaatgcaaccaaaactaggattagttcatgtgtttctttatcaatccggtagtacaatagccaatcgtcattatattgacgattaacgtgcattttgcgattttttcctacagggtgatctttatgtttggctagaaattctttgtcattggttaatattgcttcaacacaatcatcaacataatccattggataatgttttctttcatatctcttgtaagcgcggtagtagcgcttggtaggattaacttgcatgattatttccgcatggcctttttgtattcttcaaaagagctataacttccatgataaatgtgattatcagcttcatagttcgcttcatctagttctgtcatgggtcttagttctaaaggaatgccattacttctaacaatagctttgaaatacattctaattcctgttgatatgtcaaccccatatgaagcaagaatatcttgagcttctttttttaatttatcatcgatttttacactaatttgagccatagtacaacctctattcacaaaacgtattactttatctatatagtactatatactataaatacaaaatatcaatttttagcgtttgcttttaaaagaattttaaaagattataggtagtcttattatgaatactaggggaaaaaactaaaagtgacatttatatctttaatcgtaatacaccagcagaaatttaaacataaacaaagctcgaagcttctacaaattgtagtaacttcgagctttttgtaactattcagaaaagataatttagcggtcttcgtggttagtgaagtaacggtagtccttactcttgtcgaacaatacggcacgagcgttttcaccgttggagattgagaagatagcgtcagggtacttgttcttaacttcatcttctaccaatcctctaagcatttcgttgttagctaaaactgaaccggttaaagcaatcttcattggcttaggatcttcgtaacggtcaagaccgatgatgatgtcacgggctaacagatgagcttgtttcttaataactttgattgcatcatcgctgccttcatcagcaagttgtgcaacgtgaacagccattcctgcaacttctgggttagacatcttgtagaatttagcgttacattcatccatgtgttcaacgccaaataatttagtaaacatttgaatcaaagcgttgtcttcacgcttgtcccagctaagaagagcagattgcattgctgaacgagcaattgcgtaacctgagccttcatcacctaagatgttgccgtagccaccaactgcgattaagtggccgttttgtaaaccgttgtaaactgagccagtaccggcaattactaaggcaccgtcatcaccttcaagaccagcgtaaagtgctaaaagtgaatcagtaatagcacgagtaggtaagttgttaattcttgatgaaatagttgcggcaacttctggagcattaccgacaactgaaagaccggcaataccaacaagaacgcgcatgcagtcaccatcaaccttgtcgatcaattcgttgatagtgtcagagatattcttaattccgccttcgtagtcagcgttaatttggcctgggccgccttctgcacgaccgatttccttgccagtttcgtcatatgcgattgcagttgagtgggtaccacctgcatcaacaccaatttggtatttaagagccatgttgtaaatcttctttctatattaatttatccgaatgataacgtatacattgtattatatttttatacagtaggtctagtaaaagttttgctgttagcgctaacagtggcttttttcttgcaaattaataaaattgttaaactaattaagctaaccaacatccccagtagaagaacccatggtacataaattaatgtaatttgatgttttcctggattcaacttgaagtttaaaaaagcattcatgaacaaggttttattcttgttaattattttgccattatctaaaactaaccagttaatgttattaggaatagttgacgccaatgtcatcatcttcttcgttgtgaaatgattagatttgatgatcaaagcaggtgtttgtttaaagtttggttgtttttgcttaaaacgatgtataatctgctcgagcttttgtgtgtttaagcgccagaagtgaatgccactaaggtctagtttatctttttttagttcaaaagtaacttgcaaccgttgaccacgctggtggctacctagattaatgagacgggcattttgatcacgtactgccagattaatattagcaccattaactgtcattgaaatggcattatcatcgatctcaccgggcatttcaatgtagtaagaatcatcagtctgtggtttgaaattgaaaatgatgcgtgcgatttgcttattgtttttacgattatattgtagttgatcgtttttcatactagttacattaattaattttgctttaggccaattgatctgcttaaacagctgcacttttgcccctgtaactgcttgaaagaatttggtttgattactagtaatatctagagagttaaaattgattttttgcgttttttgtgatgttaaaaagagtaggggcaaagcggcattatttttcactagatatagttgggaaaagcgtttttgcaaatgataatcgctggcatcaacgcggtggttggaattgtcatacttcatttgcttaccagacttgatcgttgtgatttcatcattaggcaaaagataatatttgattccaagtaaatcatctgtcaaagtagttccgccaaaattagtgtaggaattactattgtttagaaatccaagattgttgatcaggttgagtactttttgatcagaaatcgaattaaaattacttaaaccgtaataaccagcgctaaaaggatcatcatcagaacgatagaaagtcttttcagttcggtaaaatccagaatcatgttgatttgcgtattgtactgcttggctgacattagtggtaaagttctgataatcgctatttttttgataagctaaattgcctagagatagtactaggttgacgattaactcaagctcgataactaaataaaaaaatggcgcggcaaaactgtgttgatgataaataaagccaataaacaagattccgagggctagaaaagctcccgtggcaatctgcgcatcttcagttagaaagtcaaaatgtgaggcattaaatactatataaacaattaaacctaaagaaaatagagtcagaagtccggtctgccaataagctatacgttctttttgttctaatgcaataacgcctagatttagcgcaaaaaagatcaacacaaagctgaaacgaccaggataccagacagggaattggcctaaatgccagagtaaaaccagtggtgtccaaaaaagagaagcaattaagaaaatgagtaaaattccgtttgctaatttacgctgccagttaatctttttgcttaaaaaatataaaattgtcagcaacaagaaaggcattgtcagataaatgttgggcatcccttcctgcatttcatgaaagttataggccccttcggctaacttagtcagctgttcaactggagaaaactgccagcccaaattccatgaggcagtagaactagccttgccttgcaacatttcaatcagaacggggaagagcataaaggcatctaaaaatgaaccagcgatactttttcttaaataaatccagttaaggcgtaggcgctcctgcttattgatgaagaaaattttgcttaacagataaagcaaaccaaaggctaatgccataaatccggtataaaaattagtgaaccaaagcaaaaaggtaattaaaattaacttattttttcgttgggccagcaagcggtcgatggcattaatcaataaaggaagcaaaatcacagaatcaagccacatcagattatagtgattgccaataacgtagcctgaaagggcataagccgaactagccgctaaagcgtaaaagtgattagtgattttttgcttccaatagtagtaggaagatagtcccgccgctccaatttttaatgcgataataattaaaattgcttgtggcaaaaaatgttgcggaaataaaaataagagtagattgaaaggactgcagagataataggcatcagttgctagcattgaaccgcctaaaccattagaaaaggaatagattaagcgcaagggatgggagaacaaatttcgcctgaagaaggcaagaaaatcaacatattgttgacctaagtcgacagtgagcactccatttttgctgtagaaaaagtaactcaagaaaatcaaagccggtagcaaaaaactaagccagaaaaaaatatttttacgattaattgcaatgtgtcgtgagttaagaaatttaagcatcattaaaaattatataagctcccttatgaattgtagaattgatgtttactttttgttaaaatacatctagttttaataaaggtgatttacgtgaattattttagaaaaaatagtgggactggctcaaacaagcattcctcaactccaattagaatgcgaatcattctaggggtaattttagtcctctttgccatgttaattgggcaattggcttatttgcaactagtttatggttcacgtttcaaggcagaagtgcaaaaaactgattcaactgttgtttcgcatcaagtgccacgtggtgtcatgtatgacgctaagggacgcgttttagtaggtaataaagcaaccaatgctattacttatactaagagtgcctcgactacaacagcagatatttacaagatatctaatgccttgagtaattatatcaagattagcgatgaaaagccgacaaagcaaatggcagcagattattatttagctaatgaagataataatactaagatatctaatgctttgccgaagtcagccaagattgatgctgatggcaataagaagacttcagctgaaatctatcaagcggaattggcttatgttgaaaaaatgaatcctcaactaaccactcggcaaaaaacagcggctttaatctttaataagatttcaggggcttatactttatccacgatttatatcaagaataaaggcttaaccgatcgtgaaattgcccaagtaggtgagcacttatcagagcttcctggtgtgggtatcggaactgactggcaaagatcttatccaaatggttcatctattcaaagtatcattggttcggtttcaactgaaaaatctggtttaccaagtgatagcttgcagtactacttaagaaatggttactcacgtaacgaccgggtaggtacttcctatcttgaaaaagaatatgagccacttttgaagggaactaagtcgactaaccaggttattactaaatcgaatggtaatatccagcagactaagactgtttataatggtcaagccggtgccagcttaatgttaacgattgacgctaagtatcaaaagcaagtacaggctactttgaaacgggtttacagtacagctgttggtaacggtgcagcaagatactctaatggtgcctatgccgtggcgatgaatcctcagactggtgctttgctagctgtagccgggattaatcgaaacacgaacactggtaaaacgactgataatgctttaggtgtaattaaccaatcctttgttatgggatcagttgttaagggggctactgttggtggtggattaattaataaggttattactcccgaaaacaatactttgcctgatacggcaatttatttgccaggttcaccagttaaaaagtcagtttatccagttggtactttcagttcattggatgctgaaacagcgttggaagtctccagtaatatttacatgatgtacttagcaatgaaatgggttaaggctagttatgtaccgaagagctacattcatatgccaaacgatgcctttgacattttacggcgtaattttgctatgtttggcttaggtcaaaagacaggcgttgacctacctggtgaagtgtcaggaattgaaggtaagtcatttaatgacaagggtaatattctttccggttctgtacttgacctagcttatggtaactatgatgcttatacaccaattcaactagcccaatatgtgtcaactattgctaatggtggtaagagattgcaaccttatattgtgcaatcagttggtaaaactagcaaaaatggcaagaagatttacattagctacaataagaagccaaatgtccaacaagtaattccttggacgcttgcggaacttaatgtggttcaaacagggttctatcgtgttgttcacggtacaaatggttggggaactgctcacccattgaaaaatgttaagccatcaatttctggtaagactggtactgcacaaactttctactatgatgctgaacaccctaatagaaagcacaatatcgaattgattaatgcaacctttattggctatgccccatcgaaaaatccaaaattagcagtggcggttgttttcccaggattagaccctgatggtgaaggaacatacacattgcaagttgccaaagcaatggtacaagattatttcaaacttcattcaacaaaataaagaataatactggtcaaacagcttgaaaaatgctattctagtacagtcagaataaaagtgtaggtggtgaaaaaaatggcagataacatcattttagaatgcaccgaatgtggcgatagaagttacttatctaagaagaacaagcgtaagcatccggaacgtttatccttaaagaagtattgcccagttgaaagacgcgcaacacttcaccgtgaaactaagtaataaaccaagatagcaggttacgtgcctgctattttttgttttttggacaaaaagatggaaaaatcagaattaagaaaagaacaaatcagtaaattaaaagaatttgccaatactaaagaaaaaagagcagaagatgcgattttattagagaaattaatgtctacagatctaattagaagaagtcagacgattggggtaactgcttctttaccactagaagtagatacttctgaattaattgctcgtttgtgggataaaggaaaagaagtttatctggcaaaggcacgaggcgatcaaaatcatactttagactttttacgctatacgtatatgagcaaattggtaaaatctaaattcggtgtggaagaagtcgccgatgaagatgcgaaaatcaataatgatttggatttagtcattgtgccaggtttagcctttgccttagattcgcatgttcgacttggctttggtggaggttattatgatcgctttttggctaagcatgatcctaaaactgttgctttagccaatagcaagatgacgttcgatactagcatttggcctatcgaaaaaaccgatattccggttcaaacaattgttactcctgataaaatttattaaaatagtcacaatgacgaagataagggggattaaatgaatactcaacgaaaaattaacctctcacaatcatttgtgactttaggaattttagtagttttattaataatctttttagttgaagtgtttttaggtggctcagagaataccaatgtcttgatgaaaatgggagccatgaataattttgccgtggtggctggacaccaatggtggcgcctatttacggcccagtttttgcatattggcatcatgcatttggtttctaatgccattattatttactacatggggcagtatatggagccattaatgggacatgtgcgctttttagtaacttatcttttagctggggtcggcggcaatctaatgagcttggctttcagtgctgatcgcggcttaagtgctggtgcctcaacagccttatttggtttgtttggagccatgactgccattggcttgcgcaatttgcataatccaatgattgcttttttaggtcgacaagcctttgtcttagcattgattaacttagcgcttgatatttttgtgcctggaattgatatctggggtcatattggtggcttaattgccggcttcttattagcgattatcttgggcgatcgtgtaatgaagacctacaatcctaagtggcgcgtattggctgctgcagtgttagtcgtatatgttgtttggacggttagaacaggaatgataattaatttctaatgaaaactctctacgatgtacaacaattattagaaaaatacggaattttggttcatgttggcaaaagaatttgggatattgaattaatggctttagagctcgacaatatcaatcgtgccggtctgattgaccaacatgattatttgattgccaagatgattttgagtcgagaacatcgaattgaagtcaaaaatgaacaaaaaaaggcgcttaaagatccgaaaaatgatagccagtaaattagtttagcggtatcataatagatgtaagtttttatgaaagggcagatttagtttatgtcgagttttttaattgtcttagatttagttttattagtcattattttagtcatggttggtatctgggcttggaataaaattcaagctaaatcaattggtggcgaattgactaatgaagaatttaaagaaggcatgcgtaaggcacaaattattgatctgcgtgaaaaagaaccgtttaaacgcaagcatattgatggcgctcgcaacttgccatataccatgcttaagtatcaatatactgagcttagaagcgacttgccagtttatctttactcagattcaaagaccattactttgagagctgcccgttttttaaagaaaaagggttttgtttctatccattggcttaaagatggctttgaagcttgggatggtcgaactaagaagtcaaaatattaaatgaaaagaagacgcatttggagggggtaactctaatgcgctctttttttgtatcaaaattaagaaaggtgatggggatgaaaaaggtactagcgattgtaggaccaacagctattggtaagacagacttggcgattgatttagctaaaaggttgaacggcgagattatttctggcgattccatgcaggtttaccaagaagtggcagtgggaactgcaaaggcaactgcagaagaacaagcgcaagtgaaacactacttagttgatacgcaatccgtttttgacgagtattcagttaaagattttgtggatcaagcaacaaaagcgattgaagagattagccaaaaaggtaagttaccaattattgcaggcgggacaggtttttatgttaatgctttattgaataagatgcagctaggcgagaaaactccagaagagcgtagcgtttcgcaaaagtgggaaaactacctcaaggaaaaaggcgcagaaaaattgtggcaggtcttgaatgagcaagatcctaaggcggcagaaaaaataccagtagccaatagtcgcagaactatgcgagcattgactgtgattgagcgtacaggcaaaaagttttcagagcaacaaaagcagatcgagccccgttatgattacttgattattggcttgaattctgaccgtcaagagatatatcgcaggattaatttgcgtgttgataagatgatggagcaagggatgctcgatgaagcaaaatttatttatcaaaatcgagcacgagagtatcaggtcttgcaagcaattgcgtataaggaatttttcccttattttgaagggcaagagacgctagagcatcgcattgaagatttaaagacagcttcgcgccgctatgctaaacgtcaattgacttattttagaaataaattaccagtagtttggtttgatccgttagatgatccgggttgcgaacaaaagatattgaagaaagtcaaggaatggaaaaatgaataatttgccagaaaaattacaaaaaattgttaaagaagttgatcaacagatcgcacctaaactggttgagattgaagatcaaattgtctataatacggctaaagttttggcggcttaccaagctaatgatgtcgctgaagccgatttaaatggggctaatggctatggcgacgatgatatgggaagagataagctagataagatctatgctcaagtttttcaaactgaagatgcggtagttcggcctcaatttgtttcaggtactcacaccttgtttgtagctctagcaggtaacttgaaatacggcgatacgctaacttatttaactggacagccttacgatactttgcaaaaagtgattggcttgactgatgataagcgtggtactttagtcgagcgcggcgtgcatttttcatatgtgccgttaaccgatgatgggttagttgattatgacgaggctgaaaaggttcttaaacgtgatcagcctaagatcgttgccattcaacgttcacgtggctactccaccagaaagacctttacagttgatcagattaaggacatgattgcctttgttaaacgggtcagccctaagagtattgtctttattgacaattgttatggcgaattttcggaaaaacatgagccaactgagtatggtgctgacttaatggcaggatcgctgattaagaatgctggtggtggtctagctaagaccggtggttatattgttggtaaaaaggacctggttgaaaatgcaaaacttgcattgactgctccaggctgcaccgatgagggcgccactattggcaatttgcatgacttttatgaaggctttttcttggctcctaatgttaccggtatggctgaaaaggggatgatttttgcggctgctttgtttgccaaaatgggcttgaatgttaccccagcttgggatgagaagcgaagcgatattattgagacaattatttttggtgatcctgataagatggttaaatttgtgcaagaagtacagaaaaactcaccgattgattcctttgtaacgcctgaagctgtgcatatggagggctatgaagataagattattatggctgctggtaatttcgtttccggttcaactattgaattttcagcggatggtccaattagaccaccttatgcggtttatatgcagggcggcttgacttatgcgcatgacaaagtagctattattaacgcggttcgtgatacattttttaacaaaaaataaaatttaaaaataatcactagaccaatttgacttttttaaattggtctgctattgtattaaacagttctaggagataagaataaatcataggaccataccaatttaatattttttgtttttataggtgaattaactatgagtaaacaatatactgcagaagaaattaagcaagaagttgaagacaaggacgttagatttttacgcttggccttcactgatattaacggtactgaaaaggccgttgaagtacctaagagtcaattagataaagttttgactaatgacattcgctttgatggttcttcaattgatggctttgttcgtcttgaagaaagtgacatggttttatatccagacttctcaacttggacagtattgccatggggtgacgaacacggtggtaagattggtcgcttgatttgttcagttcacaccactgatggcaagccatttgctggtgatccaagaaataacttgaagcgtgttcttggtgaaatgaatgaagctggattcgacacttttgatattggttttgaaatggaattccatcttttcaagttagacgaagatggcaattggactactgaagttccagatcatgcttcatactttgacatgacttcagacgatgaaggtgcaagatgccgtcgtgaaatcgttgaaactcttgagggcatgggctttgaagttgaagcagctcaccacgaagtaggtgatggtcaacaagaaatcgactttagattcgatgatgctttgactactgctgacagatgccaaacctttaagatggtaacgcgtgcaattgctagaaagcacggtttgtttgcaagctttatggctaagcctgttcaaggtcaagctggtaacgggatgcacaacaacatgtcattatttaagaatggcaagaacgtcttttatgacaaggatggcgaattccacctttcaaatactgctctttacttcttgaatggtattttggaacatgctcgtgccattactgcaattggtaacccaaccgttaactcatacaagcgtttaattccaggttttgaagctcctgtttacattgcttgggctgctaagaaccgttcaccacttgtacgtattccaagtgctggtgaaatcaatactcgtttggaaatgcgttcagctgatccgactgctaacccatacttgttacttgctgcatgtttaactgctggtttgaatggtattaaagaacaaaagatgccaatgaagccagttgaagaaaacatctttgaaatgactgaagaagaaagagcagaacatggtattaagccattaccaactactcttcacaacgcaattaaggccttcaagaaagatgatttaattaagagctcattaggtgatcacttaatgcacagcttcattgaatcaaaggaattagaatggtctaagtactcacaatcagtttcagattgggaacgtcaacgttacatgaactggtaaaaataaataagtaattggaaaatctcgtggtgattgaggccacgagatttttttgtaaagtatagatttttcaaaagcatatctaatcgtaattagtctaattacgattagataagtgaacttatggataagtttttaaatctagtaggataaacttttaccaaaaatcaaaaaatattctcttcaaagaagagcaaactgctatataattgtaataatgactggactggtatccctaattagtttagggatacttttgtgttaatgagaatgtattggagtcgatggaatgagaaataagacattagtagcattttgtttgatagctgcaatgatcaatttaactgcttgccaatcgcaaaagcagactaataatcgccaaactattgaaaaatctggtgtgactcagaaacagactcccaaaagattaattgttaagagtatgtcagatactgaaaaatctagtgcaatctcaatttatggatcgatgaaatatggggatgcatggaagactgcatatagtgatgccaagaaaaatcatttgagcattagtgtaaaaaatcgaactggttttaattggataaaaaaaggtagaggttacatttatgaagtaactggcaatggtcaagaaaataatgctttttatacaatgaaaagtgaaaccgtatatttttataatcagaagaaaaatttaggtgtagcaagtttatctgaaatagcttcatatttaagtgaacataatcaagtaaaatctgtagaaaaattagcaactaagactactttggctgctgaagttacatctgacaaatatggggttaagggtgacgatggcctagcattagttccaacgagactttggggtacttggtacaactataaaggaaagaagttagtaattactgatcatactgttaatggtgaagaaattcatcatatttctaattctggtgtagcagcagaatccttagatcaaacgaaaaagtgggctagagctcggatcgaaaatattaatggattaaattgctatcatgttcaaacattgaatgctcaagattttggcttactttattctgtccaaaaagataatggcaatacggcagtagtaacttatagcgttgatacaggtcattatacggctacttattggaagagcaccaagatagccaaggaacaccgaaatgcagaatttaagactttaaattaatatttgtaaagaagtattaaaataattgcaatgaacaagaagtataatttttgtaaaataatcatgtaagaagttggcggatcgtattttttataatactattaagcaaagagatagaattattgaaagaaaaggggattccttttgaaaagtaaattaactgttttggttgcaatttcagctgctttaactttagcaggatgtagccaaagtacacaaggtaatagtaattcacaatcacagtcagaaaaatcaagtcaagtttctaagagtaactcagaaaaaactggcacctcagaatcaagtaacagtcaaaactcagcaaaattatctgctgagaatatggactataagacgcaggctagtgcaatctctgtctatgctgcacaaaagtatggcgacacttgggaaattgcagttaatgctgccaaaaatggtaatttaggtgttgcgttcagaaccaaagccgcaacaggtattacttctgatgactcaggatatgtttatgaggtctccggtaccggtaaaagcagtaatgctcgttacatgctaaacggagatggagcacaaaagaaaattactatttttgttaagcaaagaaaccttggtactgtaactttacaagatgtagttgattacattaataaaaataatgatgttgatctagttcaaagcttggctaaaaatgccaaactaaatgttaaacttgaaggcgataatgacaatgcagctggtgctaaggaatctgctagtgccgtaattccatcaagcttgcaaggtacttggtacactgcagatactggcaatggcaatatcgatactttgactgtaactgctaataagatcaatgatgaagctggttttagcatggatgtaaaggctaaaaattcaggttcatcaactagttcaggctatatgaaacaagctactattaatggaattaatttctatagttttactaatatgggtcaagaaccaggtcaaggcagtacatatttggcaccgcatactgaaaatggtcaaagtgtaattgtttcagctaactctaagggaacaactaatgctgtctactggaagagcgaagccttggctaagcaaaactccaacaagcaatttagcgatctacagtattaaaagtgaataaaatatagaattaggcgatatctttgtgatatcgccttttttgttgtgaaaataaatttctaaaattatggcacttcctttcaaaacatatgtttgatataattgtaaaagtgtttgggcagactaatgaactgactattgagtaataaggaaaggaattatatggattttttagctcaaaagaaggaataccgttttaaaaatattgaaaatcaagtgtgtcgtgttcatactcatttggctattaacaacaataatttgaaagtttggagagaaaatgatgataagaaaagtagaaaggctactaagttaataatggattcactacaagatgacaataaatacatgtttcctgatttagtaatagttagttcaaaatatttgaaggtagtagctgcttacgatcgcgaaaaagatgttatttatgttaataaaggtatctatactcatcaaattgttaaatcgcatttaaagtcaagttatttcgttgctaaagatatgagaggaattttgtggcatgaatatggatataaattacattgggatgcagttaaaagcttttataaagtacataaaagtaagtataatgatatatattaaagaagcaaagatgttttttgattctaaacttgagcattatataaggctacagtatcctggttatcttaggaaagtaatcagttcgtatgcagaagatagttactttaaagaacataaaataaatgaggtagtagctgagttttctgtgataggaaatacgtgtgataaagaattgaatacaattattagggggatgctagaaaatgcaagtgctaaatgatttgaaaatgccgaataaagaaacactatattttaatgatcatattgtcccttggatagaaaaagaagagtgggctaataatgagcatacagaagtcgctttaacttttaagaaaaacaccccagtagatattattaataaatttttgatttgtcgatctgaattagcctattaactatactgcagattataaaattgtataggaagaccacatgttgtatccatatgcagaatttcctggggaattgtcaattacatattctcaaataatggtagacgataatgtaaagggtggtaaaaagcttttggtccactttgaacaaccgacagattatggatttaaagaagccagatatgagttgcctgattataaagaaatttacaactacgactttacaccttctgaaactagaaataatctagatattcttaagagaaacgaaagtctaatttggaagtgtgccgaagaggagaaaacaagtacctaattattttcggcttaaaaattttactatgactacaattgattttcatgactaataagaagaactcactataagtgggttcttttttaataattacaccactataatatcttaagtaaagctaaaaatgattcagttagaaaagagtaaatatgaaagtcttaaaaaaagtgggattagcgttgttgtcagtgatactggcatgtgtaattatcttctgtggctattatatatatttgtctctacattattatcgaattcctgataatcaaagattgaaaattaataacaatcagtctcagttattaaaagcgggggcgtagctataagacaacgacttataatgttggctttggtgcttataatcatgatttcgacttctttatggattcaggtcagttgaaggatggcaagaaaccgcaggggcatcgagggacagcaatatctaaacaagcagttcttgattccactaatggtgtcattcaaacaatgaaaaagcagaaccctgactgcatgtttttccaggaaattgatactgattcaactcgtagctttcacgttaatcaggtgaaaaaggttgaagatgattttccaaaaatggattcaacttttgctagtaatttccactctgcttttttagcggttccattgaacaatcctcatggcactgtacgttcagggttgttgagtatgagcaaatataagatggatagtgccataagaagaaaatatcctgtttctagtgggcctattgaaaaatttgtcgatttagatcgttgctttgtagttatgcgctttccagtaactaatggaaaagatttggtaatgattaactcacatatgtctgcttatgataagggcggtaaaatgcgtaaggcacagatgaaactgatttcttctgtgatggaaaaagaatatcgacgaggtaactatgtcattgtcggcggcgactttaatcatgcgttagggaaagacatgatgactcattttgagcaccaagaagaaattcctagttgggtatccgttcttgatcaaaaaatgctgcctaaagatttcactatgattaaggcgcaaaatcgcgaaaatgttgcgactgttcgtgctacagacatgaaatatgatcctaaagttaattatatgaccatttgtgatggctttattgtgtcgaaaaacgtgcaagcaaaggcgtataacattaatactcattttgagtatgcagaccataatccggttaggttggagtttgaacttaagtagatttggacaaaatgaaaaacactggatcatgaaactgtagatttatgatttagtatttacgaaattaacttatgaggtaaaatctaatgaaaaaagaattatcatataaaggttattatggttcagtggagtattcattagaagatgatactctctacggtaaagttattgacatcaacggtcttttatcatatgaaggccaatatggggtgaaataagatgagtaagattcaagagttcatcaagaaagatattgagagacatccagaattaaaaaaagaatatgaacaggtagaccttgatttagatgcttcagtattagttaaagatatgcgcgaaggttgggaaatgagtcaataagactaactgaagaatagttagtaaaataatgaaaagcattaaaattatatttgacttttaaaatgatttagactattatcttaatcaacataattattaattatttagcgatgataaggaaagtaaattggcggtccttctacagagagttatcacttggtgaaagataatgatcgacctacttttgaaaatggcctttgagcttgaagctatgaagtttttagtagcttctgggtccgcccgttatagcggtaacgtatcgccagacggccgtacgcaattcaaggtggttttccataaagataggtggtaccgcgttactgaacgccctattagatcaagttgatctagtaaggcgtttttctttttaccgtttttagcaaaggagatttttatgagaataaataaaaaagttgtttcattcggattaatagctttaactacggcaaccttagctgcttgtggtaagcaatcagatagtaataccgtttcaaaaaagcaggttttaaattggtcagagatcacacagctttctacgcaggatccttctttggcaactgatactaccagttttcaagctcttcttaataccggggacggactataccgccttgataaaaacaataaaccgcaattatctctagctactaaggctaaaacttctaatggcgggaagacttatgatttttatcttagaaaaaccgcaaaatggtctaacggcgatccattaactgctaaggattttgtatattcttataagcgtactgttaatccagtaactaagtctcagatggcattctatctttaccagatcaaaaatgcgcaagcaattagtaagggccaaaagtctccggataccttgggtgtttctgctccttctaaatatcatttgagaattcaattaactagaccactgccttacttcaagattttattgtcgtggccattatttttcccgcaaaatcaaaaagtggtgcaaaaatatggcaagttatacggcacgcaagctaaatacacagtttcttcaggcccattcacgcttactagatggaatggtaacaacaagacttggactttaattaagaataagaattactgggatgctaaaaatgttaaattaaataaagttaatgaacaggttagcgaatcaactacgactagctataatctttttgaagcaggtaaggcagatgagactggacttactggtgagcaagttgccgcaaataagaataaagcaggctaccatgcacgtttgtcttcagcgattaaaagattggaacttaacgaaaataaggttccagcattcaagaatcttaaggtacgtcaggcattttctttagcaattaatcgcaaacaattagcaaataatgtcttaaaagacggttcaatcccagctaaaggcttcgttccatcaggtatgggcaataatcctaagacaggaacaccatttgaagatgatgcttacgttaagagtgcagtatcgtataatcttgctaaggctaagcaattacttcgcgaagggtataaagaatctaagactaactcaattaaaattaccttgttagtttctgatgacgatacttcaaagcaaacagctgaatttcttcaaagtaagctagatcaacttccaggtgttcaaatttctgttcaaacaattccatatactcaattgatttcacgtcaaacagctggtaattaccaagctacaattaaaaactggcaggctgtctttggcgacccaatcaacttcttggacgttttccaaaaaggatcaagttatttgaacaatggttggaataacaatcaatttaacaagctgttgaatgaatcagaaaacgtatatggcaatcaaccagtaaaacgctgggcaagattagtagaagccgagaaggtattgatgaaagaccaaggaactattccattagttcaagttgctaagccacaattattaaagactaccgtaaagggcgtttcctttaaccctacaggcgttccatacgattttaagaacgttagaattggatagaaaaatagccgttgattacttgtataaaaaacaagttttcaatggctttttttctgttttgtgctaatacctaaaaatatccagttagatttcaggtaaaacacttgaacaaaacaaaaacgccttcaataacagaagacgttttctagagtgcgaagtattatgaattatccaattaatctcttcaccataattattatatcaggtatataaggttaattggttaatactatctatgaaatatagttaaatcagatataacaaacgataatcatatcaggctatttgttgtatgcatcgtatttttcatttaagacagaagtaatagttcgagtcattctatcgtgatatttattattctttaaaagtagcgtagtaattacgtctattacatacattattgaaaactgtgagttaataaaccgagcgtcgttaatataatttgtatcttgaacaccaactacaatatcagcaagctgagctaatgggctattgtcatagctagttaatgctacaactgtagctttattcttttttgctagttcaatggctcttaccaaggaatctgtgctacctgttgaagaaatagctataatcaggtcatcttttgaaatgatactgctagtcataaacatattattactttctgtttccgcaaacgcagatatacccattcttagtaatctttgagtagcttctaagctggtatatccagaagaaccgataccataaaaataaactctctttgcagatttgatgagttggattatcttttttaattgttttatatcaagtttattttgtgtttcagatagaactcgattgtaaaaatcatatacttggtgagcggtcgttttagagttatcttgattagtaatagtatttacttgtgaagaagctgcagcagcagccaatttgacttttaaatctgtaaaactagagcagttaactctacgtgcaaatctagtaatagtagcattactaacttttattgttgacgctaattgatttatatttgctgattgaataaactgtgggtcctgtaatataaataaagcaatttttctttcttgctgaggtaaatcgggtagcctattttgtaaatcagttaaaaacgtcatattgaaaaccttcttaatgtgttaaatcaaaaaaacagagaaagattttgtaatctttctccgcttaattatgctaaatttgtagttttttggcaaataagcaattacttattaaaatatttagcgtagatttcgtcagcgccttcaataactttatcagtgtatttagccattggttcacggttgtagccagcatgtacgcccatcttttgcaatactaacttaattgatgggtaaataccgttattaagaagggcagtgataatgtcgttcttcttgtgttctaattcttgtgccttagcaatgtctccgttgttgtaagcagcaatttcttctttaaccattcttgcattaacgttgtaggttgatccgatacagccatcgacaccttcaattaaagcaggtaacaacatttcatcgaatcctgaaagaataagcttatcagggaagcgctcacgaagtctttcaagtaagtagaagtctgcattagtgtacttaacaccgataatctttggatttgagaataatttagcaaagttatccaatgaaagtgaaacacctgttaatgcagaaattgagtaaatcaataactttgcatctacatccttaacgatttcatcgtagtaatgcttaatttcgtcgaaggtaaagttatagtagaaaggagtaactgcagaaattgtcttgtaacccaattcagtaacgaacttagctaattctttagcttcttttaagtttgggccacccacttgagcgatcaagtcaacttgttggtcaacttcgtcccaagcaatttcgaagatcttcttcttttcttctaagccaagcataaagttttcaccagttgaaccgccaacgtataacccgtcaacaccttcaacatcgatatcgtgacgaatgatttcacgagtacctttttcatcaatattaccatcttcatcaaatgaaaccattaaggctgcataaactttttgcatttgtttgacctccgtttagtcaaaataaaataatatttttttaattactgtataactaatggcaaattcaaccaacacctgcagtatagaacatgaaaacgctttacgcaactctaaattgcgaaaataattttcagaaattgaacaaagcgtaggtgtatcaagagatacagagcacgaaaattattttctaaatttttatttgagaaaattgtttttaaatgatactatgaaagcgcttaatataagaacttgattatacaggaaggcgtgaaccaaatgagtaagaaatatttagcttttgatgttggcggaaccacgattaaatacggtattgtagatgagaatcttcagatttcagatagaggcaaagttgatacattacataataaggacggacatattttgaagtcacttattaaagttaccaaagagatgatacagaagtatcaattagatgggattggtgtgagtaccgccggtattgttggagacgatggaagcataatgtatgctggaccaactatttctgactatcaaggtactcccattaagaaagagctagagcggacatttaaaattcctgtcagtgtcgttaatgatgttagtgcggctttattaggggaaaaattagctggaagtgttaaaaatgctagtactatctattgtgttgcattaggaacaggaattggtggtgcattttgggcagatggacatttatttaatggatatcatcaaacgggtaattcaataggatatacattatttgatccaataacatcaactaactatgaacagcggtcatcaaccattgcattacaaaaagaattagaacccttaggtattgatcctattgaagcctttgcacgtgccaaaaaaggaagccttagagaaaagaaaattattgatgcttgggccttgcaagttgcagagggcttaagcagtgtattattacttcttgatccagaagtattagttattggtggtgctgtttccaagcagggagattatttaaaagatttgttggacgaaaaattgaatcagattttaccgccaaatctatgtaaaaccgtattaaagatggcttctttaggtaatgatgcacaactttatggaggtatttctagcatttttgaaaattaatttctagaaagcgcttgcaataaaattgttttcgtgtatgctagaggtgtattaactaatagcaaaattcaaccgtacttatgtgaggcaaatgctgagcataattgtacggtttttttaatcccgtttattgaagaaaagaggaaagtcatgaaagtttcagtgaatgcggcaatctttgttgatcgtttgaatagcggagagagtcaaattgattgcttagaggatgtttcaaatttgaaagataaaattgacaatatccaagttcgtggagaattctttaaagaaaacaccaaagacgacgaactcgaagcaatcaaagcattgtgtaaaaagaacagttggggattgtattattcagttcctgaacaatttttcattgatggacatgtcaataacagtttgaaagacaatgttgaaatggcaaaaaagcatcaattgaagcatttgaagtatttcgtaggtgacgttaaagatgttgaccaaaaggaaattgaggatgctgcgaagcttcttgaagatgctaacgttgatttgacattggaaaatctttctaatgaaacaggctatttaagtactgttcttaaaggtcttgaagcagtaaatcaatatcctaatattggcttcacttatgatgcaggtaattggtactgggttggtgaaaagcctgaagttgcctttaaagaattaaaagataaggttactaactatcatctaaaggatattaagaataaaaaaactgtgatgttaggtgaaggaactacagattgggaaccaatgattttaggacttgatcctcaaattccaatcttcctagaatatggcattgatgataacaagattgaacaagaacttgacaaggtcaatgctgttatagacatgcggtaggtgactttgatgacgtaccttgtacaactatttttgattctgctattaactaaaattgcggcacacttttcagttaaggcaaaaatgccaagtgtaattggagaattattagtcgggattttagttggaccagctattttaaattggattcagcccaccacattcattaattatttttctcaactaggtgtaatcgttttgatgttcattgctggcctagaaggagatttgaaattattaattaaatattgggctccagctttaactgtagctactttaggagtaatttttccaactggtacagcatatcttctgtgccatacggcttttggattttcagtaaaagcatctatatttatgggcttagttttaagcgcaacatctgtaagtattacggttcaagttctaaaagaaatgaatcgtttaaatactcgtgaaggtgcaattatctgtggtgctgctgttgctgatgatattatctgtgtcattttattaggaatttgctccagtatctacggtggtggtcaccatacatcaatcattaaaatgatcattccgatggtattattctttatcattgttttgcttattggtaagtatgttgtgccaaaattcttagatatttttagtgatcttaatgcttctgaaagtgatacagctggtgcgatgattctttgttttggtgcagctgccttagcagttgcaatgggaatgagcgatgttttaggcgcatattttgctggtttagcaatttcagaaactaattatgcagacagattatcaacaaaaattgagccaattggttatgcagttttcattcctgtgttctttgtaagtattggcttacagattagttttaatggcatgggtaaggacttattgtttattgccttactaataattatagccatcttgggtaaacaaattggttgtggtatcggagcaaagatgttccatcttaattggacagaagcaaatattgttggtgcaggtatggtttcaagaggagagatggcactagttgttgctaatgtagctcttcaatcacaattaatagatcaaaatcactatactgcaatgattgttgtcacagtaatcacaacattgattgcgcctattatattgaaacttttcataatgcgaacacaaagaaaagaagtaaaaatgaattaaataaaaggggagaaaaattatgtcgaaaacaggattcggtatgtggaacaggatcgtcttaatcgcatatttgctagcgatgttaggcgttggtgcttactttactaaacgggcaagtaaaagtacagattctttcttcaaagctgaaggtaaggtgcctgcttgggctgcaggatttagtatttgggctactactttaagtgcgatcacgttcatgtcaacaccagaacaagcttttttaactgactggggttattcgattgggacgttaacaatttatttaattattcctatattaattaaatggtatgtacctttcttcagaaaattacaggttactactgcttatgaatatctggaaaagcgttttggaccagtgatgcggtcactcggaagtttgctatttatgctttatcacattggtagagtagccattgttatttacttaccaattttggctattacttccgtttcaaatattaatccaatattgattgctgttttagttggtgcaatgtgtattatttatgcattcctcggcggtattgaaggtgttatttggacagatgttattcaaggtttccttctccttggtggtgctttattaatttgtattttagcagtcgtatatactggtggacctgggaagatcgcacaagttgctgtagataattctaaattcttatctgctaaagattggaatcctaacaatttagctatgttcattccagtaatctttgctggtcaattcttcaatagtatgtatcaatataccgctagtcaagatgttgttcagcgttatcagactactccaagtattaaagcaactgccaagtcactttggacaaacggttggttagcaattgtaactatttttgtattctttggtatgggtactttcttgtattgttattaccacacgatgggaagtttaccaaaaggttttaacactagtgctattgttccatactttgtaattaccaagattccagcaggtttagccggtttaattattgcaggtatcttcgctgctgctcagtcaactattgcttcaagtttgaatgctatttcttcatgtttcgtaactgacttcaagcaaagatattttgataagaaatggaagatgaatgatgttacactagctcgtatcattattgtcatcgccggtgtatttagtttaggaattgctatttacttgttgatgggtaatgcatctcaaacttggaatatcttcctttcaattactggtttgtttggtgttccagttgctggtatttttgctgctggtatctttactaagtcagccaaccgtgttagtgctgtctggggcgtattaattagtgctgctcttacttattggtgtcaagtaatgggtgttgcaacattggtacaaccaattgtagccttcattagttcattcgtaattgcttggttaattggtttggttactccaaaatatgcacatgatatcacaggtttaactgctaaaactatcaatgagaaggttaaggattagttgaaaaaggtgaaactataatgaaagattcaatgtccttaaaagatatggagtcatatcgaggtagattagaagttccagatgattttgatagtttttggagcaaagaaatcaaaaagatagaagcaaagccatttaaattaattaaaagaaattttggcgataatattaaaaacgttgttttttatgatttgttcttcaaaggtactgataacggaatagttcatgctaaatgcatttttccagcacatgaaaaaaatattccagtagttttctatttccatggttacatgggacaagctctcgattgggttgatttcatgcaatatgctgcgataggtgtaggcgttgttgcaatggatgttagaggccaacaagggcagtcggttgataacggtacttatgctggaaataccgttttaggccacataattcgtggagcagtggatggaccagatcatctgttttataaaaatgtatatctagatgtatacacgttaattgaaacagtcgcggatatgtcacgtgtagacaaggaacatctatattcttggggtggatctcaaggtggtgctttatctttgattgctgcggcattaaatccacgtattaaaatgtgctactcaatacccgtttctttctgatttcaagcatgtactagaaatgggtgatcgaggattgccatatgatgagttatttaggtattttaagttttatgatccatttcataagacggaagacaagttgatgcgtactctgtcttatatcgatgttaaaaactttgctcatagaataaagtgtccagttttaatgtttacaggacttgaagatgatacttgttttccagcaacgcagtttgcaattttcaataggatagaaagccctaaaaaacacatgctgttaccagaatatggtcatgaagcaatgttttattatgttgatagtgccgcatttaactggctatttgatactaagttcccagaaaatccaccggacactagtagtaatgctttagaataaggtaaatttttaggagataaaaatgaaaaaagaagagtttattcaaaaagttcataatggattaattatttcttgtcaggctttacctggcgagccactttacaccgaagagggtggcataatgcctctgatggctaaagccgctaaagaagcgggtgcagttggtttgagagctaactccattagagatattaagcaaattaaggaagtagttcctgacctgccaatgattggtattattaagaaagaatatccacctgagaagccatttattaccgctactattaaggaagtagatgaattagctaaaacagatgtcgaagtaattgcacttgattgtacattgcgcccacgtcatgatggtaaaactgttgcagaatttattgatgaaattaagactaaatatcctgaccgtttattaatggctgatacttctaactttgaagaagcaaagaatgcttatgatgctggtgttgactttgttggtaccactttgtcaggctacactgaagaaagtcctgtttcagatcatccagattatgatttagttaaagctttggttgatgctggaatgccagttattgctgaaggaaaaatccacagtccagaacaattaaagaaaatgattgatattggaccagccggaattgttattggtggtgcaattacaagaccattgcaaattgctaagacatttacgagtgtttttgaataaatgatcttctgattagttataaatttcccctctcccaaaacaagctacgtttgtaaaaggcagacgtagcttgtttatttttggttataaagtcgaatttttatagaaaaagcgaggtataaaatgtcatattttattcatgcaaagaagttttatttagatcatggtgttgaagaacgaggatacttagaaattcaagataatggacaatttggattttattattctgaagatgaaaaaccaaaaagtgctgcaattttagatttcaagaatttctgaaaaacttcttcaatatggtgtaacaagttggatgccgaccacagtaactacttcatctgagaaattagatgaaatttgtaaaacgtttgctgcacataaagggcaggaaaaaggcgcaaagatattaggtattcactttgaaggctcatacttcactaaagaacatggcggtgcagaaaatcctgagtttatggaggatccttcaattgaagaatttgataagtggtacagagattctgatgggatgctgagaaagatatcactagcaccagaacgaaaaaatgtcccacaatttgtcagacatatcgttaaaaaaggcgtagttgcttctttaggacatactagtgcaacatatgaagaagcacgaaaagcccttgacgcaggagctacaatgtttaatcatacgtttaatggtatgaacttattatctcagcatacacctaatattattggctgtgcattaacagctgacgatgtatttgatgaaatgatagctgatggtcaccatataaagccgatcattttgcagatgttgtttgatttaaagggacctaatcatattgtattaatgactgattgcttacgtactggtgggatgcctgatggtgaatatgtgcttagtggtatgaaagtaacagttaggaatcacattgcattgttagaaaatggtaaattagctggcagcacattgactttggataaagcagtaagaaacttagtaaattgggaagtatgtaagccatatgaggcaattaagatggcaacatatactcctgcacgtagtctaaatgaaaactgtggttgtatcctgccagatagggatgctgattttaatgtgctagatagtaatcttaatgttctaaagacttttgttaatgggaaagaaaagtatagcgtaaagtaaaaatattattatagtgtgaaaaaggcataggttgtgatatgaacctacgccttttcttatagttaatgtcttctttatctacttgaataatgattttctaacaggaaattgtaaagaatttgagactgtaaaatagtttgtgtaaggatgaataattccttaaatttatttcttaaaacattagaaaaaggagttcctttctcgtatgattggtttgaacaaaaaaacacatacagaaagaagaactccttcatgaatgattttaccaaaaatatagcacaagctctattcaatcaagacaaaataaacgatttattgcgcaaagagctacaacaggctgttaataacttgctagaagctgaattgactgcctttctgggctatgatccctatgccagaaatggctggaatactggcaattctagaaatggtgcttatttccgcaaggttgatacccagtttggaccaattgaagtgcaagtgcctcgagaccgcaacggtcagtttcatcagcacacgctgcctgactacaagcagcactctgatgttttggaaagcacgattatcaagctctactccaaaggcgtaactaccagagaaatcgctgacttgattgagaaaatgtatggcagtcattatagtccagctcaagtatcaaatatttccaagcagatgctccccaaggttgaggcttatcacaagcgcaagctaagcgacaagtttttctgtgtctatttggatgcgacataccttcctttgcgccgagaaacgtttgagcgtgaagcagtatatattgccattggcattaaacctaatggacataaggaagtcattgattactgcattgctcctagtgagaacattgaagtctggacagagatgcttcaaaacatgaagtccagaggcttgaagcaagttgaactctttctttctgatggtgttgttggcatgaaaacagccttggccaggacttatcctaaagctcattttcaacgctgcttggttcatgtcatgcgcaatatctgtgctaaagtccgggtggatgaccgcgaaaagatcatgaacgaattcaagcagatacatcaacagacaagccaaaaagaagctgcagctgtcttgcatgaattttatgcaaaatggaataaagcttatagccatgttatcaaaggtttgagggaaattgagcccgatctgctggtcttctacaattatcccaaacaaatcagagcttcaatttattcaaccaacatgattgaatcctttaacaacgtcatcaagcgtaaagctaagcctaaggcagaatttccaactgaacagtcgcttgatgtatttattggcatccaggcaatgagctacaatgaccgctatttcgaccgaattcataaaggctttggtcaggttcaggataccttagaatcctattttgattaaataaatgattaaaaaatcaatttacgagaaagaactatttacacaaaagatttgacagtttcgattgttactactggtgccggcacaccaaaaccatatatgtctgatttaaaagctgctggaattaaggtaatgccggttattcctaatgttaagattgccaagaaaatggaagaaatgggtgctgatgcagttatcgttgaaggtatggaagccggcggtcacattggtgggactacttcaatggtattatggccacaaattgctgacgcaattaatattccattaatcgctgctggcggtatcggtgacggtcgtggtgttgttgaagcatttgttgctggtgctgaaggtgtacaatgtggtacaatcttttcaattgctaaagaaagcccagtaggtgataactggcgtaaagctgtcatcgatgctactgatactggtactgctgttgttggctctactatcaagggtggtgctactcgtggtattgctaatgaggaagctggcaagttgtttgaacttgaaaagacaggcgtatcaagagatgaatttaattcagcattgaacaagggactatacgttggtgtaagagaagatgaccctgataagagtttctttatggctggtgaagttgctggtctaattaaagaatctaagcctgctgcagaaattgttaaagatttaatggatgatgctcaaaaagtattgaataaaaacatcgaaatcatgtaatttaaagccattttatggctgtggaattaatacataaaatatttataatcaagcattaaataaaggcgaatgtaatttcgccttttttattattattataagttataaccaatagttatgataatgctaaaaattaatgatttcacaatgctagatgtaagcggtaccttataagtgtcaaggaattaaatgattccaaaattctactaatttgaaacatactctcatacatattattaaactcatctggtttccaattcagtagaaacgtagttagttagatttaaacataggaggataaatctatgtctgttaaagttattgacagtaaaactgcagcagaattggtcccagataacgctagtgtagctcttgatggctgccttggcactgatgtcgctgaagaaattcttgaaatgatgaaaaatagataccaagaaactggacatccaaaggatttggatgtttggtatggatgtggtatcggtgataacaaaggctcagccgttgaaaactttgctgaaaaaggaatgctccgtcgagtagttggtgggcttgggtcattagcgccaaagcttgcaccaatggttgcggataatgattttgaagcctttaatttcccacaaggtacaatttcacaattgtttagagatgcagctgctcaccgtccagttctagtaactcatactggattaggaactttcgttgacccagaaaatgatggtggtcgtttaaatgaagctgcaaagaattctactttggtaaatagaattaagattcatggaaaagattaattagcttatgaaacaccaaagccagatgtatcaattttccgtggtacttatgctgatgaaaacggcaatatcacatttgatgatgagcctttaaccatggatgttactgctgttgctatggcagctcacaacaatggtggtaaggtaattgttcaagttaagcgtgttgttaaggctggtagtcttgatccaaaggccgtcagagttcctggcgttttagttgattatgtagttccgactgataatcctgaaatgactaaacagactaccgattacatttacaatccagatattattaagtctaatattgtaaaagacgttaagcaaatggacttacctcttgataaaaagaaggttattgctagaagagctgcattcttattcaatcctgataccgaccattgtgtaaacttcggtattggtcaatatccaatgtattgcgcaatggttatgaaagaggaaggattatctgacaatatcgtaactactgttgaagcaggtacattcggtggcacttcattaggtggtggtagttttggtacagctattgctcctcaagctactattgatgaaccttacatgttcgatttctacaacggtggtggacttgacgcaacttacttaggtttagctgaagctgaccaatatggtaacttaaatgtttcaaaatttggtcctaagattgccggtactggtggtttcgttgatattactcaatatacacctaagattgtcttcactggtacgttcactgcagctggacttaaggaagaaatcaaggacggtaagttaaacattatccaagaaggtaaagtaaagaaatttgtaaagcatgttcaacaaattaccttctcaggtaaagtcgcatatgacagtaatcaagaagtttggtatgtaactgaaagagccgtatttaagctagttaaaggcggtattgaattactggaaattgcgccaggcattgatttacaaaaagatattcttgatcaaatggaatttaagccaattattagtgacaatttgcaggagatggatccgagaatttttcaagagccagtcatgaatatcaaaaacgataagaaatagttaagtgttttaattcatagggggatgcaaagttggatattaaccaaatccgttatttgctcacaatagcagataatgactttaacttaactcgtagtgctgaagtcctccatatttctcaacccgctattagtaaagcgattaaagatatggaatttaagcaacaagtaaaaatctttaatcggcgaaagggtaaaatcgttggattgacacgttacggtataactttagttaaggaatctaaaaaagtgtatgaacaatatattgaaatggtttcgaaactaaatgaattatcagaaaatagtaacggaactgttagattaggtattgcaccagttattatatcgaccgtgttcaatgatgcgttaatagcctttattaaccaaaatccaggcattcaactaaaaattatcgagcgtggagcttatgaattacaaaggatgttgattttaggtgatattgatctagctgtgattgtttctccagcgactgttgaaggtatttatgaggatttaatatacgaaaatacagttagggtttggtttaataaagaacatcgttttaatgattttactggtccgattccattctctgaaatagaaaaagaaaagattgttactctgacagatgattttatggttacctttcaattgaacaaaagatttaaaggtgataggctgaaacctaattattttcttcaaacacaatcatgggatttgattttaaatttagttcaacgtgataagaatttaattggtattgtggctgctccaataggaaagaattatagtgatcatgcaataaagaatgctgaaattacacctgaatttccttggaagatatcgatttgtcatactatgaattccactgaagatccaacagtagaatacgctaaaaattggtttttgaaatacttttctaaatataaaaagatatcaattgattaaaaattaaggaagaatcattatgaaagctatatttccaggtagctttgatccaataactaatggtcacttagatatcattagtcgtgcttcaaaattatttgataagttagtcgttgttgtttcaaataatacctccaaaaatggtatgttttctcctcaacaaagatatcaatttgttaaagacgctgtgtctgtttatcctaatgtttccgtgagccttgttcaaagtgatttaactgttaatttggttcatgaattaaatgctgatgttattgttcgtgatgtgagaaataatgaggactttgtttatgaacaacaaatagcattaatgactaagaaaatggaccccaatatagaaactttgattctattttcaaaccctgaatgttcatacatatcttctagtattgtaagagaaattatgctatttggaggcgatatttcagatgctgttcctgcttgtgtaaatcgtgctctaataagaatgaaaaatcaacatatggcaaggagcgtatcattatgaagactagaaaagaaattaccaatttaacgatcacagctgtatttattgcattgctttttatccagacatttgttccgaatgttgggtatgtaagaattcttcctagtcttcctgcaattactactattccattaaccattgctgtttatgggactttaatgggaccgaaatggggattgggttttggattagtttggggaattactcgtttagttgtggcctatacacaaccaggggatatggtcagcttgcttttgttccaaaatccagtaatctctcttgttcctagtgttctagcaggattctttcctggattaattagtcagaagtttaaagatagggatgcacatattcaaaagatagggtatatgctcagtggagcagttgcttcgctgacgaacactattcttgtaattttacttaccgatttaatgtttatgtctaattcaagcaccttaacaagttacttagggcatttttgtcagtcaactccattgttggtaattctagtcactgctctaggtttcaacggcttggtagaagcgatatttaatgcaattcttgtccctataattgttacacctcttaatttggtacttaaaagagcgtaaatgatgaataattttattactgttgaccgtaatcactggactaaattaaactctaagattgagcttccttcttatgaactattaaaaagttttattgatcaaaataagttacaggttacagtcaatgaacttcaagaagtatatatcctattagttcaatatatattgatttgcgttcaaaataagaaaatgttctctaaattaaagacaaattacattaagagtgctgatttaaaccagccatttatcctgggaattactggatcagttgctgcaggaaagtcaacgactgctaaagtaatagagactcttattagtcaattttactctgatttagatgttcaatcattgacgactgatggctttatttatcccaacaaagtactggagcaaaagaatttaatgtcacgcaaaggctttcctgaaagttacaatgtatcactattaaatgattttctttctcaagtaagtgatggggtagaggaagtttcctatcctgtatactcacatgagctttcagacatagttcctggtaaatatcgtagcattaccaatccagatattttgattttagaaggaatcgatattttgcaaattcctgaaaatgaagagaagattatcagtgattatatagatctatccatctatattgatgccagtgaaaacttattagaggaatggttcttaactcgctttaaatgtttgctagatattaataaagataatcctaataatttcttttatcattgggctcatattcctttagatgaatcaattgattatgcaaaaaaggtttggcggacagttaatttagttaatctacgtgactatattgtaccaaccaaggaaagggctaatatcattctttataaagatgtaggtcacagagtaacatcaataaaaattcgaaaatattagaagtatctctttctaagcagttcatgagaaatcatggactgcttttggtttaatgtccgtgatctcatcggggtgcaaaacaacatatacgaactagatccacgatagagtataattaggttgaaaacttaaggcagaatagttgtagagtggagggaaaaatgacaaaatatgtggtaaatagtgaattaagcgatactgaatggcaaattgaaaattcaactgccagatatcgctttatagctgacaatggtgataaaactggaggccctgatcctgttgaatatttaactggggcattaaattcttgtatgtctatttcagctggattgcttattaaggcgcaccatctggacgttcaaaattttaagattaatgcggaagcgaataccgagagattatcacacggaatgccagatgttgatacgataactatcaaaatatcatttgatagtcctatgtctcatgaagatcaagataaatttgttaaagatattttaagagtatctactgtctatcaaacgttgaaaaaagcgatcaagattagtattgagtggaattagcctaagttaaaatgactagtacgaaagaagcactgaagctaaagacaaataattctaaatacaatgcagtagtaaggccatactgcaatatcaattaataaagcaaccagtgtagataaaagatctatactggttgcttttgtttgatttaagttagtgacagtatcattaagttaagacattgacaaatttgacgcttttggaaccgaatcattttgattcggttctttttctttttacaataaaataaagagtgagcagaagtctatatctgcttactcttttgtctcttatcaatttttttataaaaagagcgtagttctcatgaaatcccttcacacaaacattttaaaactgatgaatcagattatcgataaaattcaaaattcattattgacaaaacaataaaataagattagcataatattaaaattatttaagaaaggagctacatatcatgttagaatcacaaaattcagcaacagtagaattacgccgccgccaccaaaatgatggtttattttgtgatcctaaattatggtgtgcggcgaattttgtttaaaaataattaattaagttgattactaagcaaggttcacattcctaattgggatgtggacctttttttgttacagaaaagagaaaaaactatgaagtcaattaaattatttggttcaactggtctacttattggtgctgctttaactttagtagcatgtggtcaaagcaatacaaatgcagcaaaaagtgcaaagaaatttcctgaacaaactgtacaaaaaactgcacagaaaggtggcactttaaactacgcaatcgaaacagatacgccttttaaaggtatttttgatagtcaattatcagttgatcaagttgattctgatgtcatgcaatttggtaatgaggggttattcgatactgataatttatatcaaatacgcgtggtgctagttaaatcgttttagttaataaaaaagtccaatcggattagactcaagttgtaagtaaattaaatagaaaagagtctgatctaattgaactacctcaagcttaatcgtttctctcaccatttacaagttagttttagtcgtttaaatgtaatttgtcgttcactatataatctttatgcgcctgataagcttacgcatcgaaaaaacattgatcaaacaaagctttccgacagctccatcttagcgatgctcatttggcaaactgaaattggaattgaatcccaaagaagattctgtaaattttttgttggcttatctcattctcgctttaatcgtcgagccaagatgcttttgcctttaattcgctgcatccgtcaagcttggaatcaagaggtaaaggttgctggagaatttttaattattgacagttttcctgttccagtttgtcagcctgttcgtaattatcgtgttaagatcttccgtgacatagccgatattggctataaagcaaccaagaaagtctattattatggtttcaaggtgcacgcgctagtaagcgatgatggctatttgcttgactacgcagtcactaaagcatcagtgcatgatgccaaagaaacagtagaattgatgattaatgctcatccaattaaccattatcttttaggcgatgaaggctacttaggaaaagacttagctgccgagttaaaaggtatgggctatgtcctttggacaccatatcgaaaaaacatgaaaggtgctaaaaaacataataatcatcaactgatggcaattagaagaacaattgaaagcgacttttctttgctcagttactataacgctgaaaataaccgagcaaggagcttagctggctttcagcagcggctagaaatagccattttagcttataatatggcatattgcctagaacgatttaactagcaccacgcgtatatcaaattaataataaaggacctgctacttttaaacttgataaaaatgcaaagacaattactattacggtaaaaaaaggtgttaaatggtcggatggtaagcaagttgtagctaaagacttagaatatccatatgaaatgactgccaacaaagcaactaatagtttacagtattcagattctttagaaaatattgttggtatgaaagcttatcacaatggaaaagcaaaaactatttctggtattcaatttcctaatggtgaaaatggcagaaccattgtcattcattttctttcaatgaagcctggtatgttgcaatcaggtaatgattactttattgaaactgctgctccgtatcattatctaaagaatattcctttcagtaaattggtttcatcagatcaaattagaaaaaatcctatcttttttggcccttataaagttagcaaggtagttagaggacaatctgtaacttaggttccaaataaatattactggagaggtacaccaaaattaagcaaaattgttgctcaggtagtttctactaattccgcatcccaagctattaagagtcataagtttgatatagccgatgtggtaaattcacaatggcaagcagttaaagatgcgaaagatacaaaattcattgctaaaattcctcttgcttacagctatctcggcttcaaagtgggtaaatggcaagatggtaagaatgttatgaatcctaattctaagatgaatagcaaatctttacggcaagcaattgcttatgcaatgaatattaatcaagttgaaaagagatacacgcaaggtttgacttttagagtgccaaccttaattcctgaacaatttggtgattactttgataaaaattctaaaggctatccttacaacttaaagaaagcaagtgaattgttagataaggcgggatataagaagaaaggcaaatggagagttcaacctaacggaaaaccattgagcattcatttagcagctatgagtgggtccgccgttcaagaaccaattattcaaaactacatccaacaatggagaaagattggacttcatgtgagtttaactggaaacagattaatggaattcaattctttctatgataagttagaccaagacgataaaaatatagacatgtttattgcttcctggtcattgtctagtgaaccatcacctagaggaatctatagtgaaactagtgcaatgaatgactcaagatttgtgacaaaagagaacaacaaattactcaatgaaattgattcgtctaaggcgtttaatcatgcatatcgggttaaggcctttcataagtggcagcaatatatgaatgatgaagcttatattgtgccaatgactaattcttactccattaaggctgtgaatagcaagctggttaactattcacttaaaccggctgaatcaaattcgatttggtataaggtgggatttgctaaataatctttcttaagaaaaattcccttccagatgattgaaaacgatcaagattttcttttttgagaatcttggtagttttttatgatttgtaattttataaatgattaggcagtttgaagtctatatgtgtatatttaaattgtataaaatctccttaaatgctgatataacaaggattatttaatatagctttttagcctaatgaagataactatggttatatttatataatatattatatattttagagcagaagtaaaaaaattcgaaattgtttattaattatctgaaaattgaaagcaccaaaatcaagctcaagtcctgtcactattgagctttcttagacgtaattagtttttatatgatctgtttcagtgcaatttgtatgaatcgtggcagttggttaataaagtcattgattacttcatctatcttttcaaaactattctgtttaagctcttttaattctgaaattaagtagaccaatgcatctacgaatctaatatcaggtaaggattcgttcattagatagaataaatctccgattgtcttatcatctgtattttgtctttcctgccaggtcaatagatcataagttattgctgtaactgcgatatagccacattggccatcatagctttgaacttgagatttatctaaagcaagatattgcttagacgtcttaaaatatgtttcaatttgccatctacgaccataaagttggatgatttcttcagggctaagctttgtctgagtagtagctaaaaccaaatacttgttcttgtttccacggttggagacaaagacgagctttaataaaaagctatgtccatgatattgagcctcaactatgcttgaataaagataatgtttctttttacggatgtttgaagcagccaaacgatcatacaagtctttaacgctatagcggcaatggcgataaatgtaataaatctttgaactcttcttgatcatgccaagtccatctaaaccgatcttctttaaaatccaaaacattcttggagaagaaaaccaagaatcgaataagacgtatttagcttctactcctaatcgtaaggcttgtctaatcaactctacagttacatcattcatctttctctgagcttgatttctccttttaccagaaattgaacgttcatcagcagtaatgggagcagctccaatcatatttttcttggttttggttgacatcaaggcaaagttaaccggcaagaaggtattgccatcgctccagcctaaagttaaaccacgatatccgttcaaatactcatgcttgtcatggtcatagactttagctagcaattcggtctttttagaaaaagaccgagccatcagcgtatcgtcaacgataaaagcaagtcggcgtcttttatcgataaatggttttaagcagccaatgagccgggctgcaatcaagcataatagtttttgcagttgattcttccatcgttaagtacattgcgagcagttctaacggaaaaacgtttgtcatccttagctctgaataaagaaagccgagcaaaatgtactgacatcagccaagagataatcatggttaatgaaacggtggatttacgcttaaaattgacttgtttagttaacttagctagaccaattagattaataaatgaagaaattaaggatttagtatcgttttctgtgtcgatttgttctatactgttcattgcgcaggatctcctttactttttaggtcgacacttaaagtataacgcagagagatcctgcgtttttatttttgataagaaaaagccaagaggcgcggggaaagagcgttaatcttagctttcaagtttcagttaattatatagaaatggttatttaatttgcttaacctaatgctatcgcatttgaaagagctttcaatatcttttaagatgttatctaggtttgttattaaatatttacgcatatagacttctttatttaacctgctaccctattaagtgaagagacttataacgaagtttaagaaaccgactacttcttaaataaatgagtttaaatttaaagcttgaaaataataaggacttaaaaatttcgagctttcataaataataaataggggattaggaaaatgaaaaagagcattaaacttttatcaacaattagcattgccgttgctttagcaggtggtgcaattactgcagttaacaatcaagaaacttcaaatgttgatgctgcatcaataacattaccttctggttacaccaaggatgccgttatcaaatggaaccaaactggtaaggccagcaaggctttggtaaatgcctcaattaagggtatgaaagaaaataatgatagtgatgctggttcagacaacaccttggttaatgtaactaagttaactgatagtcaaaaagttgaattaagcaactacactttggaattgattaattctgctcgtaatcaacttggcaagcaatcttggacttacaagcgcggtgcattaaattttgctgaccgtgtagctaatcaatattactcaaacaacaagtcttgctgggatcctgatcactatgttactggtattgaacgtgcagccaaggcttcaggtcttaactcacgtgttggtcaagtttacgaagatgaagcaggtttgccaatttcttcagaatttaacaccaactaccgtacaatgtcggctttgaagagccaaatctacttcaacgttaagcagatgctcttcggtggctttgctggctcaagtagccaaatgggcgatgcttctaagtatactgaatgggaacacgctggcgacttgcttggctgccgcactaagcgctacatccaaaactacaagaaattcaataattaatctgacgttgtagtttgaaactaaaaaagtttcctaatccaagagttcaaacggtttagtcacctgtctgggctctttttaatttgcttaagaatattttgaataatatgattaaatttctattatgtgagattttttcaaaatgtggttgactgtaaacaacaaatagtaaagaatacagttaatgaaaagcgaggaagaacttcataagttagtggaaaaggttattgatgattttgctgcttgggatgaagatgagcgctataaggagccagaaaaagaactacgtcagctgttggaagatagtaaggtcttgggctttataatgtacactagattgagtgatattctgggttggcatcatcgtatgttgactgaagccaaggaagagagaaccttaacagctaaggaggaagtattactgaatgacatggatgcagttcatgatttgatggaacgaaccatggatgaagagaatggtaggttgtagaaagcattaaaattacagaaaaataaaaccacattgctcaaaaattgaagtgagtaatgtggttttttacgttgtaattattgtagtagccaatcaataagattgattttttgaatcccgtcgtagttggctgtgggattgatagtatcaagggttagtaaaagtttggaatgaactccaaacaaatgacatttattgctgctttttggagtcaactccaaaaagctgactttatcgttttgatggaattgaataggggcaagggagatattgtaaaagcgagtgtcgagtaaatagtgaactgagacctaaaagttagacacttttaggtctttttctacgtaaagtcaagcataataagaagtttgacttcattttttgtttaaatttcaacttaaacatcttttagtgtcgatttatttttttagttagacacgacaaataagcccagatccatatctgatttttgggcttagcgttataatgtacttgatcaattaattacgactaaagtctttttgattatgtgtggctacgttgtaatcatatggttgatcattgataatcagggcataaatggttctgattagtttatgaattgaagcaatagctatctttttgaaccctttggtttgagaggatagctttttgctttcataataatctgctatatgacacggatttgtcttagctgcattatcaatttgtccaatagctcgataaagcaacttacgtgcgactgcattgccatgtttagtaatacttaaattagagtccatttctcctgactgatatctgcctggatcaattccgataaaagcattgattttattaggattactaaatctgcgtaaatctcctaactctgctaaaactctgacagcagtggtctgtgcaaagcctggaatgctttctaggttttctaaatcatgattaggcaaagacttcgctaacttaaccattcttgcgattaaattttctctttgatcacttaaattaagcaatctgtgtgcataatactgcacttgctcgacttctatgctagagcaagatacaactggataagcttgataagctaattcaattaatttatctgcagtccttagagcgtgtttaaaagcaatcccctttaagctcattaaccagttaataagctgttttttatcttctcttcttactaagtcacaatgaggatatcgcacaactatttgccagtaatttttacctttagcagaagaaaatagattttcaatttcaggaaaagtcgattgtagagcttggtaaagtcgatttttagccattactaagtcagctgttaactggtcatagaagcggctcaaagcattaagctgcttataagtttgagattgaagttgattaattggatgatgatatagtctttgaattaaggctaaatgataagcatcagttttatcagtcttattatgacgtagtcccatatccatttcttttttagctttaagaggattaagaattacataatcatagccatagtcttccagaaaagattgcagtgtacgtgaataaacaccggtagcttcaaaaataatttgcggatgtttagaaaaagcggttaattcatgaagcaattgaataaaaccaggacgattattagtaatggttagttcatttttgctttcaccaattagttcacaaacagtagaagtagacttgcttacatcaattccaaaagtaacttgcataataaaaacctccaaaacttagtagtaaaacgtatttacttaagaaatcagatctaattttctaaactcgacatctagtgtccacattcttcgaagagactattgaaaacttaagtaaaactgccagtttattatgcgacatcaagtgtctaaagacctcagggcatatcgttttactactactttaattctacaaaagaataaaaatagtgaatcaattatcccgtcggataactaattcactatttagcttagaatgtttactatgtctaaatttaataaagaacaaaaaatagaaatttatcataaatggaaagatgaaaatatctcaatcagtcaattggctaaagcgtacagaatgaatctagctaatttagactatatgcttagattaattgatatgcatggaatagaaattttaactactaaaaaccaaagctattccaaagagtttaagcagcgaactattgaacaagcaatctttggcaataaaccatacttacagctgcctttggaactggggtttaaaagtattggcatgcttaacaattggattagagaatataagaaaaacgggtataatgtcattatcaaacagaaaggacgccctgcccgtgaccaaagaaaagcagaaatctcgcaaggaactggagaaagagatccagcagctgaaagaagaaaacttgcgattgcgtattgtgaacgaatacgtaaaaaaactaagtgccttggatcaagaagatcagaagaaatagctagggtgattacggatctaaggcaagaattcaaagttagtttaaattatgtattagctgcgattgcagagcaccctgagctacctataattgccagaagctcatactacaagattatcaaacgacagcccgtcaagcctaaacggtcaaagcttattgctagaatccatgagatttttaatcatcatcaaggccgctatggatatcgcagagtagctttgcagttaatcagagagggctggaaagttacggagaaaaccgttcgctattggatgcataaattaggtcttaaaggcatcaggcgcaataagcgcaaatattcaagctataaaggtactattggcaaaatagctccaaatttaattcatcgtgatttcttcgcagccctgcctaacacaaaatggtatactgatatcactgaatttcatcttaataatgaaaagctttatttatcgcctattctagacggctgcggtggcgatatagtttcttatactatctccaaacatccagatatggatttagtaatgacaatgcttgacaaggcttttgccaaagaaacagctcttaataactgcatttttgatactgatcagggctgtcagtatcaaagccctcgttatcagcgagctttaaaactccatggtattactcaaagcatgtccagaaagagcaactccatggatgatgggctaatggagaacttctttggcctgctcaaaactgaaatgttctatgatcaagaatacaagtatcataatcttcaagaattaactcaagcaatcgaggaatatatcgaatactataacaacgaaaggataaagagcagattaaaaggcttaaccccgaaagagtatcgaagtcaagcctctattaatccaatattttaattgtctactttttacgtctcagtacatttttacattaattactattatttttcttcttaattagttaatttaaaaagttctggtcaaaacctgacacctttgacacttttcctctcaacaccttgatactactagctttatccatcatatctccattgacaccaaaacaattcaaaagctacccaatgcttgatataacaataatctgctagtgtcaacttaaccaacaccagaccgacaccatttgagttaataactgacacttttcaaatttcaagattcggtgtcaacaacggtgtcgcacatcgactaaaatgtgtcagctaaaccgacaccaaattttaacttggctatgtagattctcaaccattcgcactatattaaatgcaagcctgttcaaaaacttttagctttttgaatgaacgtgctgggcctacaacatcaagcttaaatgatgttcagaaacttatggtcaaaaaggatggattgaaatgacggaatatggctatgctagggtgtctacaaagggacaagaactagcagatcaaattaatcaattgcaaactgctgggatcagtgaggattgcattttctccgaaaaatttactggaactacaactgaccgaccacaatttgctaaactaactcaattggcgaaaccgggtgatgtgattacggttaccaagctggatcggttagctagaaatacccgggaagcattaaatgttattgacccactaatgaatcaaggagtgaagatcaatgtacttaacattggcatgttggaaaactcaactgtgggtaaattagttaaaacaattctcttagcagtggcggaaatggaacgggatatgattgtggaccgcacccaataagggaaacgttatgctaagttacaccggtctgattatcatgaaggacgaccccaaagagccattaccccgcactaccaagccgcttatgagtacttgcttactcattcctacaaacagactgcgagtgcttttgatatttcgatttcaactttgcaacggatccgaaagcaggtggagcaaaataatatagcttagttttaaaaaagtatatattattttgcgctggaggatttgaaaaatggtaaaatgttataccccatttatttactggattgatactaccggtctagactggcaaagcgatgaaatcattcacctaaccataacggatttatttggtaacattgtgttctcacatctgtttaaaccagtgaaaattgaaagttgggacccaactcagcagggtttccacacaaaagcacttgcccccccacatattcaatatataataaattacgcgtggtgctagttaagtcgttttagttaataaaaaagtccaatcggattagactcaagttgtaacttaaattaaatagaaaagagtctgatctaattgaactatctcaagcttaatcgtttttctcaccatttacaagttagctttgctcggctaaatgtaatttgtcgttctttgtacaagctttgtgctcctgatgagctgaaataccgtaaaaatattgatcaggttaagctcttagacagttctattttagcaatgcttatttggcaaactgaaattggtatcgaatctcaaagaagattttgtaaattctttgtcggtttgtctcattctcgctttaatcgtcgggcacgaatgcttttgcctttaatgcgctgtatccgtcaagattggaatcaagaagtaaaaacagctggagaattcttaattattgacagcttcccagttccagtttgtcagcccatccgcaactatcgcgtcaagatctttcgtggcatatctgatatcggatataaagccactaagaaaatctattattacggcttcaaggttcacgcgatagtaagtgatgacggctatgtgctttggacaccatatcgaagaaacatgaaaggcgctaaaaagcataacgatcatcaactgatggcaattagaagaacaattgagagcgacttttctttgcttagctactataacgctgaaaataactgggcaaggagcttagctggttttcagcagcggctagaaatagccatttgggcttataatatagcatattgcctagaacgatttaactagcaccacgcgtaataaattgcgtcttagaaagaggatataaaatatggacaaattacataagcaacaagtagcaaaacgacaacgatttgccattaagaaattaacagttggaacggcatctgtccttgttggcttaaccttcattattagtggtaatgccaaggcagatacgacagttgctgctcaaaatacattcacgactcaagtgactgatccacaagttagtgcccattcaagcaatattcggattagcgacgaatcaaatacggttgttcatcaaacttcatcaacattagttccaaataaaacaacaacgccagcgcaacaaatgccgataatccataaaacacagcaaaacaaccactgcccagtaagtacaacaaacacagcaaaacaaccactgcccagtaagtacaacattactatgaattttcgcgatgtcaccctacataagccaattcaagtgattagtaatggtcattatgtattcaaacaacctttcaagcagaccacaattcgaccaggggatagtgtggatcaagaatttactgtggccggttataaattaatgaattcagaagttttgaataagtatttctattttgataaacaaggtaatgcctgccttaagaaaggtattactacgcaagacattaacattaatttagattacgcatcattgtcaccaatcaaagtagagtatgttgatgtagataacgggcatattttagcatcaatcgttctagatagtttctggatggcccctgaatctccacaacaccgtgctggtgataagaaagcaccggatgcatcacgctatgaagccgcagccattaatattcctggatataaattagtttctgaacctgttttaaagggtaaaatcactggtcaaactcgaaattcgttagctgatcctaactatgtttatttaactttcaagtataagaaggttataaaaaataattctgatagtaataggactgaattgttacttgttccagaagaaacaaatctaccgtacaaattctttacgattgctggtagctatggcaaaaggattgacctaaacaatggtaattatgagaaaaaaatgagtgaggagattagccattacgaaaaacaaggttactcctatataggaagtacagggacatatcttaattctgattatttcaattggtacgctaaggggatacatgtttacttgctaccaaacaaaccagtaactgtgaggtacattgatgagcaaggaaatgtgcttaggaataatgatacgcttgcgttcaacctagataatcctaaccaaaaaaataatggggttaatccgcaaaaaggctggtatgcaaatggtccatggcaagtccaacctaagaaaattaaaggttatcgtcttgttcgtactcttggagtaacgagtggccagtatactgtataccaatacaccacaacttttgtttacactaaggacacagatccaactgatcccaaaacgccagagacaacaacaacaacaacaactgatcccaaaacgccagagacaacaacaacaacaacaactgatccaaagacaccaagcgataagcttccggacaatcctggcaagtctggtcagacagttccagttaatattcacattcctgatggttatcaattagttcctggtgaaagtgttccaacattttacaccttcaaggatggtaaccctaatcaaatcattagttgttggttgatcccaactaatggcggtcaaccaacaactaatgatcatcaaggacaaggaacaccagctactaatacgcctacaaacactactcctaatggaaatgctgttactggcaaactagaaggtaatgttcctaacatgcaaactgggaagacgattacgtttcaaccaacgacagctaaggataaccaactaccacaaactggtaatgacaatagcttaacaaccgttgccgggattattgtaagcctgttaaccagttgcttagctgttcttggcattaataaacatcaaggctaatatgattacctaccaaccattccgaagctaatcaagacgcgatgctttaattagcttcggaattttgaatgatatatcattataataggatggaataaactttatataaatataagtaatggggattgatttctaatcttttaagaatactgtttatggttgattttttatacaatgtttccaactgagagtaaatataaaaagggagatactatgttatcagcaaagaattattacggccgtctggtaaagttaaaaccaaaacaagatcatttttcacttcgtaagttatctattggtcttatttctgttaccataggtattaccttatacttgggagtggacaactcctatgttatggctgatacgaatttgagggataataacaatcaacaattagccggatcgggtaatggcaccaatataataaatgataaagttaaaattccaaccggtgcttttcagtctaaacaaatgcaaactgaaaattgcaaagtaaataatcagatgttggataaaactgaagtaacaaattctactaaaaattcttctacactaaatgtggaaaattccaagactgctgatttgtcgagatttgattactctttatatacaaaaaaagtaaagagttttgaatttagaaattcagataataacgatgtaattagaacagtaatattaaacaaacctaccggtgttgaaactgtaactatgactttgaatgttagctgcttaaaagggagaaagcatcagcatcgatcgcacacatctactagatcgagtatttataattataaacctcaagttattgctgaagtaaatacatccaataatccattgccaaaaatatcaattttggagaaaaacgttttaccaaaaactttttttcaagtagataagaatacatttcttactcaacaggataaagagaactatgagaaatttatatcagttaataagaatgatattagcatagaattaccagctttttccattaatgatattgatattccaggctattcttatcatattaatgcaaaaaagactactcctggagcaggattaggtaaagaaaagttttacatctacactgaatcaccacaaacagttgttatcgactataccccgattacggttaaggttgaacataagatcatcacggtaacaccaaccgatccgaagacaccaagcgataagcttccagacaatcctggcaagaactatccaaagggtgttgataagaaagatctgaacaagactgttaagcggacgattactgttaataaaccagctggctcaactgttgatgctagtcaagagactactctaactcggacggctactgttgacgaggttacaggccaagttacgtatggcaaatggacaacctcaaagcttgataagtataatgcaccagaaattccaggttacactccaagtcaagcagaagtccctgcagttgatcaggtaacggttgattacacagatccaaaaattgaaattacctacacgccaaccgaacagactgggaagatcacatacgttgatccaaacggcaaagaagttggtactaccccattaacaggaaagacggatgaagagattccagttacaccaaacgttcctgcaggttggcagattgttcctgatccaaagattccaacaaagatcaccgctactccagacggcattcaaacagttacggttaaggttgaacataagatcatcacggtaacaccaaccgatccgaagacaccaagcgataagcttccagacaatcctggcaagaactatccaaagggtgttgataagaaagatctgaacaagactgttaagcggacgattactgttaataaaccagctggctcaactgttgatgctagtcaagagactactctaactcggacggctactgttgacgaggttacaggccaagttacgtatggcaaatggacaacctcaaagcttgataagtataatgcaccagaaattccaggttacactccaagtcaagcagaagtccctgcagttgatcaggtaacggttgattacacagatccaaaaattgaaattacctacacgccaaccgaacagactgggaagatcacatacgttgatccaaacggcaaagaagttggtactaccccattaacaggaaagacggatgaagagattccagttacaccaaacgttcctgcaggttggcagattgttcctgatccaaagattccaacaaagatcaccgctactccagacggcattcaaacagttacggttaaggttgaacataagatcatcacggtaacaccaaccgatccgaagacaccaagcgataagcttccagacaatcctggcaagaactatccaaagggtgttgataagaaagatctgaacaagactgttaagcggacgattactgttaataaaccagctggctcaactgttgatgctagtcaagagactactctaactcggacggctactgttgacgaggttacaggccaagttacgtatggcaaatggacaacctcaaagcttgataagtataatgcaccagaaattccaggttacactccaagtcaagcagaagtccctgcagttgatcaggtaacggttgattacacagatccaaaaattgaaattacctacacgccaaccgaacagactgggaagatcacatacgttgatccaaacggcaaagaagttggtactaccccattaacaggaaagacggatgaagagattccagttacaccaaacgttcctgcaggttggcagattgttcctgatccaaagattccaacaaagatcaccgctactccagacggcattcaaacagttacggttaaggttgaacataagatcatcacggtaacaccaaccgatccgaagacaccaagcgataagcttccagacaatcctggcaagaactatccaaagggtgttgataagaaagatctgaacaagactgttaagcggacgattactgttaataaaccagctggctcaactgttgatgctagtcaagagactactctaactcggacggctactgttgacgaggttacaggccaagttacgtatggcaaatggacaacctcaaagcttgataagtataatgcaccagaaattccaggttacactccaagtcaagcagaagtccctgcagttgatcaggtaacggttgattacacagatccaaaaattgaaattacctacacgccaaccgaacagactgggaagatcacatacgttgatccaaacggcaaagaagttggtactaccccattaacaggaaagacggatgaagagattccagttacaccaaacgttcctgcaggttggcagattgttcctgatccaaagattccaacaaagatcaccgctactccagacggcattcaaacagttacggttaaggttgaacataagatcatcacggtaacaccaaccgatccgaagacaccaagcgataagcttccagacaatcctggcaagaactatccaaagggtgttgataagaaagatctgaacaagactgttaagcggacgattacgtctcaaccaacgacagctaaggataaccaactaccacaaactggtaatgacaatagcttaacattaatgggcttaggtgcctccaccttattgggaatgtttggccttgctgctgtaaacaagaagcgtaagtaatcaaattagctctacaattttatccctttgtcagtactgatgaggtattttgatgaggttagtttaagtagcgaagctgcttgagctgaccttttcttttagcttagtttttaccatgagatttgagagctagtagacttcggatacgggaatgatcaaagttgcgaaaaccataagctgttattctagtggtcttaattttattattgtaagcagtcgttatcaatacgggttgaacaaagggactctacaattgtaagtactgatgaatttaacatcagtgcttattttggttttctacgaatagtcaaggatattaaaggaattccttggaatttagctggatagaaaagttaattaaataattaaaatggctcaaagttaaatttaaagtataacaaaacaagctcatgaactagatttattgaacctgtcaaatcttttgtgtaaatagttctttctcgtaaattgatttttgaattatttattcaaaataagattctaaggtatcctgaacctgaccaaagcctttatgaattcggttgaaatagcggtcattgtagctcattgcctggatgccaataaatgcatcaagcgactgttcagttggaaattctgccttaggcttagctttacgcttgatgacgttgttaaaggattcaatcatattggttgaataaattgaagctctgatttgtttgggataattgtagaagaccagcagatcgggctcaatttccttcaaacctttgatgacattgctataagctttattccatctggcatagaatttgtgcaagacagctgcagcttctttttggcttgtctgttgatgtatctgcttgaattcgttcatgatcttttcgcggtcatccacccggactttagcacagatattgcgcatgacatgaaccaggcagcgttgaaaatgagctttaggataagtcctggccaaggctgttttcatgccaacaacaccatcagaaagaaagagttcaacttgcttcaagcctctggacttcatgttttgaagcatctctgtccagacttcaatgttctcactaggagcaatgcagtagtcaatgacttccttatgtccattaggtttaatgccaatggcaatatatactgcttcacgctcaaacgtttctcggcgcaaaggaaggtatgtcgcatccaaatagacacagaaaaacttgtcgcttagcttgcgcttgtgataagcctcaaccttggggagcatctgcttggaaatatttgatacttgagctggactataatgactgccatacattttctcaatcaagtcagcgatttctctggtagttacgcctttggagtagagcttgataatcgtgctttccaaaacatcagagtgctgcttgtagtcaggcagcgtgtgctgatgaaactgaccgttgcggtctcgaggcacttgcacttcaattggtccaaactgggtatcaaccttgcggaaataagcaccatttctagaattgccagtattccagccatttctggcatagggatcatagcctagaaaggcagtcaactcagcttctagcaagttattaacagcctgttgtagctctttgcgcaataaatcatttattttgtctggattgaatagagcttgagcaaaatctttggtaaaatcattcatgaaggagttcttctttctgtatgtgtttttttgttcaaaccaatcatacgagaaaggaactcctttttctaatgtttaaagaaataaatttaaggaatcattcatccttacacaaactattttacagtctctccaaagagtttaagcagcgaactattgaacaagcaatctttggcaataaaccatacttacagctgcctttggaactggggtttaaaagtattggcatgcttaacaattggattagagaatataagaaaaacgggtataatgtcattatcaaacagaaaggacgccctgcccgtgaccaaagaaaagcagaaatctcgcaaggaactggagaaagagatccagcagctgaaagaagaaaacttgcgattgcgtattgtgaacgaatacgtaaaaaaactaagtgccttggatcaagaagatcagaagaaatagctagggtgattacggatctaaggcaagaattcaaagttagtttaaattatgtattagctgcgattgcagagcaccctgagctacctataattgccagaagctcatactacaagattatcaaacgacagcccgtcaagcctaaacggtcaaagcttattgctagaatccatgagatttttaatcatcatcaaggccgctatggatatcgcagagtagctttgcagttaatcagagagggctggaaagttacggagaaaaccgttcgctattggatgcataaattaggtcttaaaggcatcaggtgcaataagcgcaaatattcaagctataaaggtactattggcaaaatagctccaaatttaattcatcgtgatttcttcgcagccctgcctaacacaaaatggtatactgatatcactgaatttcatcttaataatgaaaagctttatttatcgcctattctagacggctgcggtggcgatatagtttcttatactatctccaaacatccagatatggatttagtaatgacaatgcttgacaaggcttttgccaaagaaacagctcttaataactgcatttttgatactgatcagggctgtcagtatcaaagccctcgttatcagcgagctttaaaactccatggtattactcaaagcatgtccagaaagagcaactccatggatgatgggctaatggagaacttctttggcctgctcaaaactgaaatgttctatgatcaagaatacaagtatcataatcttcaagaattaactcaagcaatcgaggaatatatcgaatactataacaacgaaaggataaagagcagattaaaaggcttaaccccgaaagagtatcgaagtcaagcctctattaatccaatattttaattgtctactttttacgtctcagtacagtgctttcgaggcttttcttttatattattttttcttagaaatagagtcacggatatttaattgactatggcaagtgatcgtaagtggaatttgaatatcttccgtaattagatctttagccaaacgaacggcagtcttgcccatttcttcagtattcatatagacactggatagggtaggagttaagaagcgattgatatctacatcatcaaaactaacaacagagatatcgtcagggatgttaacacctgcatcactaaaggctttataaacacctaatgccataggatcactaccgacaacaacagcagtaggacgttgttgcagttttaagatctcttttccagcttcaaaagcagagttagttgaccaatcagtaataaaagaatggcagtactggtcaagattgtggagtttcatccaggacaagtaagtgagttcacgtagatcatttttttcacaagcaatcttaccgtcaagatcaagaaccaatgattttccaccgatgtaaacaatgttcttgtgtcccaggttatagagggtatcaagaatatgagaagtttcttccacaaaatcattacgaacgatattacaattatgaatattggtgttgacgtcgataaaaattatatggggattaatgctttgaatctgcttaattgctacaggtgtcatttcaccctcgattagcactgcgccaaatttagctaagtcagcccaatttttattatcatcttctattctaaaaggttgctcaatacgtaaatgccatttcttggcttcttcattaatgcctttatgcagattgagaaaatagggatcggtgatttcacgagatttgttataacgcatgattagtgcaatcgagagctggttatcagtttgcttgggaccaggatgtttttgagatttcgaataatgcaggcgtttggcggtttcgataacgcgggcacgactagcctcattgattctaaaagttggatcattgtttaaaattcgtgatacgctagctggcgataccccagcaatacgtgcaatgtctctaatacttgccataaagatgctccttgtttgtttactgtttacattatacaacttttagcaagaaactggtgtataccgaacttgaggataatagtttagtgtccataaagtaagtcatattgaatcaatgttacttactttatggacactaaatttacttattttactacactacatagtaaagtgtagtaaaataagtaaaaaagcaattgaaaaagaagaatatggaaataataaaatcttaataatttgttcgcttgtttttatatttgtaattcattaaacttatgttcgaaataatgaaaggagaaatatatttttcaattgtgagactgtaaaatagtttgtgtaaggatgaatgattccttaaatttatttctttaaacattagaaaaaggagttcctttctcgtatgattggtttgaacaaaaaaaacacatacagaaagaagaactccttcatgaatgattttaccaaagattttgctcaagctctattcaatccagacaaaataaatgatttattgcgcaaagagctacaacaggctgttaataacttgctagaagctgaattgactgcctttctaggctatgatccctatgccagaaatggctggaatactggcaattctagaaatggtgcttatttccgcaaggttgatacgcagtttggaccaattgaagtgcaagtgcctcgagaccgcaacggtcagtttcatcagcacacgctgcctgactacaagcagcactcggatatcttggaaagcatgattatcaagctttactccaagggcgtgaccaccagggacatagccgatctaattgaaaagatgtatggcagccattacagtccagctcaggtatcaaatatttccaagcagatgattccaaaggttgaggcttaccacaaacgcaagctaagcgacaagtttttctgcgtctatttggatgcgacataccttcctttgcgccgagaaacatttgagcgtgaagcagtctatattgccattggcatcaagcctaatgggcacaaggaggtcattgactactgcattgcacctagcgagaacattgaagtctggacagatatgcttcaaaacatgaaatcccgaggcttaaagcaagttgagctttttctttctgatggtgttgttggcatgaaaacagccttggccaggacttatcctaaagctcattttcaacgctgtttggttcatgtcatgcgcaatatctgcgctaaagtacgcgtcgacgatcgtgaaaagatcatgaacgaattcaaacaggtgcatcaacagacaaacaaagaagaagccacagctgtcctgcatgacttctataccaaatggggcaaggtttacagccatgttatcagaagcttgaaagacatagaaccagatctgctggtcttttataactatcccaagcagatcagagcttcaatttattcgactaacatgattgaatcatttaacaatgtgatcaagcgcaaagctaagcctaaggcagagtttccaactgaacagtcgcttgatgcttttattggcattcaggcaatgagctacaatgaccgttatttcaatcgaattcataaaggctttggtcaggttcaggacaccttagaatcctactttgattaaataaataattaaaaaatcaatttacgagaaagatctatttacacaaaagatttgacagtttctcaattgtaggtaatataattccatattcgtatattgacagtacttatgaaacaaaaatcattgattagtcaactagcaaaaatacataacggtacaattactcatcgtgaattagcattaaatggagtatcaagttatagtatttcgaaagctgttcaggatggtacgttagaaaaaatacgtccgggaatttatttatttggtgatgataccgaggatatattttatagtttgcaacaaaaatataaaaaaggaatctattctttagaaacagcattatatttatgggggttaagtgatcaatatccttttagcttagatatgacttttcctaggggctacaataatccaactttggatattgaaataaatccacatattcaaactaaaagtttggctactcagggaataactcaaactgaatcattcaatggaaatgtgattaatctctatactcctgaaagaactctagctgaaatattgcgaccgattaatgctgtagatatcgaaataattaccaatgccttcaagatgtggaataaggaaaagaaaaaagacataaatacattaatgtcttttgcagaaaagtttagggtaactagaaaggtaaatagctacttagaggtgttgttgtgaaaaattatgttgatgagaagcagttcaaagcagatgtaagaaggtatgctagagagcataatataaaaggaaatgagattggtcgattatggcaagaaattatgttagatgatttgctagaaagaatttcagtatcaaaatatcgagataatttcattttaaaaggtggttttttgttgtcggctattgttggtatcgataaaagatccacggaagacattgatgctgagataaaaggattagatttgaccgaaaaacaaatagctaaagtatttgaagaaatctgtcaaataaaattagcgggggatctattaagcatttcgttgtcagaaattgaacagattcatgagcatgaagagtacaagggctatcgattacattttaatgcttcttttcggaagataagatatccattaaaagtagatgtttcaacaggggatgttattacacctagggagattgaatatagctataaattacatttagaagatcgacatattaatatttgggcatatactatggaaactatagtagcggaaaaattagaaacggtaattacgagaggaatagctaatacacgtatgaaagatctctatgatttattcatactgcagagagaacgaatcaatttagctactttaaagtcagcttttgctaatactacgaattaccgtgaatcaatcttttggacaggacaagatatagattataagtattgtctaagacaagtagatattattgctgaaaatagtaatatgcagaatctttggaatagatacgtgagaaaacatccttttgctaagggaatcacttttactcaagttattcaggcagttcaaacttggctaactaaattagagtttgaaaaataatttcaatcaaaaatgacgctagttgatcgaaccagcgtcatttttttagataatagatgtagaaaatagtttgaaaaacgattagtttttatagaaatctttattatactttacttgtcttcgtagccctttgggtgactcttgtgccagttccaagcagttgcgataacgtcatcaacactttcatgctttggcttccagcccaaaatagttcttgctttggttgaatcagcaaccaaagagtcagggtcaccgccacgacgtggacccattgtgtaaggaatatcaatccctgttacttttttagcagcgttcaaaatttcaaggttggagtaaccttgagcagtacccaagttaaagacatctgacttattagtctccatcatatgtttcagtgccaaaatatgagcatcaattaaatcttcaacttgaacgtagtcacgaacgttggtaccgtccttagtgtcatagtcatcaccaaagatagtaaacttaccatccccagaaattgcactcttcaaaatatttggaatcaagtgtgtttctggtgcgtgatcttcaccgattgtgccatcacttgcagcaccagcaacgttgaagtagcgaagagcagtgtacttaataccatcagctttatcagcccaagccatgatcttttccatcatcatcttggtttcaccatatgggttgattggatcaagtggggtgtcttcggtgattggcaatttcttaggaataccataagttgcagcacttgaagagaagactaagtatttaacaccagcgtcattcatagcttgtaataatgaaatcatgccagtaacgttattgtcatagtacttaagtggctttttaactgactctggaactaatgaatatgctgcaaagtgcattacagcatcaatcttttcatcacgtaaaattttgcttaccaaaaaagtatcttcaatatcgccttggtaaaacttagccttaggatctacagcctttctgtgaccagtatataaagcatctaagacaacaacatcattgccttctttaactaattcgcgtacagcgtgtgagccgatataacccgcaccaccgacaactaaaactttcatgttttgcgctcctttattttagttattatcttttattgaaatcgattacattataacacatattttagtaaataatttacttattttagataaattatttaaaaacactaatttagtctaaatgaaaattcatgatcttgacttgggtcgatttgatattgatcttcaacatctgtaccccagctatcgatgccacctacaccgcgaacggcacctgcgattactaaaactgttctccgggcaagaggcaattcttcaatatgcgttgcattttctagttcttctgctgtgtagggaaggcaactgaagttgaatggcttatcagtttgctcaacggtgaggtcaaaatcctcattagaatgatcagcattgttgagcgtagtatttctagtgattttgagtttatgcgtttgcatgtgcatcccattttcctgtggcactaggtatttggttactggcaatcccttaattttaaaagagccagcactggctccagccatccgatcaggataagtctcaccagataagccttcatattcaaagccactagctagagttggtatgataaagcgcattccaattactggaagcggtggtaaatcttttttaccaaaataacgcatcttaattgtaacatgaccattattgttaatttggtaagtaatttcaacttttgtttttggaatagttaaagtttcataaataaaagtaatttcgactttacttgcgtactcatgattagaaaattggttgttgagcggagcgattggcaaatctgcaaaatcatgttgatcaactttgagctgaatttcagtacagtggctaaacatatcggcgccgagccattgagctgcttttaagttgaaaccgttgccgcgatcgttatcagtagttgcacgccaaaaggttggggtaggaacgcgataaaaccattctttacccttaatttttaaagactctaagccacctttttcatagctgaaaatatattgcttatctggggtattaatgcctaaagtagcatccccatagattatatgtaaattatttgtgtaagccatagtagtatttaacctcctgcattgctggttttggtgtacgatcggcgaacattaagccatcgcctgaaaattcataatcagagtgtcggtcgtcaaagtcgccgccataccgtaatacttcttggccactcaccggatcgtgtactaatagcgcttggtcgatgaagtcccaaataaagccgcctaaatattgtgggtattggtcaagcaatttaatgtaggaacccatgccaccatcagaattacccatatcatgcatatattcgcattctaaaaatggcttttgaggcttatttttaagatattcttcaacatcttttggtggtaaatacatccagctttcaagatcagaaatcttgtcctttaattctggcgtatgaaccacgccttcatagtgggtcaggcgactatgatcgtgtgctttataaaatttattcatagccgcaatgttttctccggcatatgattcattgccaagagaccagaagagaatggcggtatggttttttaaagtttcataattgttgcgggcacggtcaattacagcttcacgccattcaggaatagaaccgggaacattatctgaaggttcaacttgtcccatcttttgccaagtaccatgtgattcgagattattttcagccatgacatagattccattttgatcgcagagatagtaccacggaatctgattaggataatggcaagttctaaccgcattgatgttattttctttaaaagcatgtatatcttgtttcatatcagttaaagtgatgctgcggccacgcttcatattccattcatgccgattgaccccattaataattagacgttgaccatttaataaaacaaccttgtcagaattaatttcgatttttctaaagccgaattggtaaggaattagttcaagtaaatcaccattttcagcgtgaacttcaataattagttggtacaaatatgggtcatggttatcccaaagatgcacatttttgaataattctttttcaatttttatggttaagctgattggtgcttttttctcaagtagagttttgccattaatatcttctacgaacaagtgaactgagccagtatttttgcctgtaaagtgcaattgagcattaaagattccatcttggtaattatttgtaacttctggttttaaatcgagatcggttaaatgcgtctcaggtaggccgagcaattcaactgaacgaaaaatgccagaaaaacggaacatatcctggtcttccaagaaagaggcagtgctatgtttgaaaacttcaactgctaaaatattgtttttgtttttaatgtaaggtgttagatcaaattctgaaggagtgaaactatcttcggcgtaaccaacaaaatgaccattgagccaaacatacattgctcgctcaactccttcaaaaacaatgtgaacatcacgacctcgcaaagtggaatttaagtcaaaatgcttaatgtaagagccaactgtgttatctgcacctttgctaaaagagtcggtagctttttggttgattgtgtaagcaggtcgacgataaatttttccttcccacggaaagagcgtattaatatattgattttgagcgtaattatttagctcaatttcacttgggactggaatgtgatcaaatgatgaagaatcgaaatctgttttaaagaaatcaacgggtcgtgtttgtggattagctgaaaacttaaaacaccagtcaccatttaaactttgaacaaaactactagtttgcttttgccattcgcgatagttcttgaaatagggatgatcgctgtgggcaggaacttgattaacgcggaaaacttcggggtcatcaagccagctaagatttgctttcatgaaaatacctgatttctataaaaaaattaaccttgaaaacgcttatattataacacatagataataaatttacttaataagtaaattatttactgaaaaatattttgaagattaatatttttgactcgaaaacgaatgacaaagtgcttatgatatttattggaattacgtaaatattttgtataataaagttaaaaattatttatttaagatagaaaagatataaatatgacaacaattaaagaaatagcacaagaatcagggtattcttcagctacggtttcgcgcttattaaataatgatcctaatttgtcaattacggctgatactaagaacaagattttagaaattgccaataaattgggctattggaaggatcatcaggaaaagaagatccgtccaacaattgcgttactataccgagtaaatcatgaagagcaactgcaagatgaatattttacttcattaaagcaagcgctgatttcaacagtagaagcagagtcgctgcagatgaagactttttatgatgcagatgatttgattaaacatgcatcactttttcagggctttatcggagttggcgcggcgccaattgaaaatgcaacactaaaaaaactccatgaggttttgcctaatggggtctttgtcgatactaatccagccccggaattatttgattccattcgcccaaatttaacgctgacagtaaaaaatgcaattgatctttttcttgataaaggatatcagcgcattggttttataggtggcattgggcctaagcatgatcatattcaagaagtagatgtacgtgccaccgcttttgcggagtatatcaaggtgagaggcaaaagtgatgaattgatgtttgttaatggcccgtttagcgttgctaatggctataagttgggaaaagaggtactggctaaatgcaaaaataaattgcctgatgcatttttaattgcttcggatactttggcagttggagttttgcaagcttttaatgagaacaatgttaatgtgccaaaagatactgcaattttaagtattaataatagtaatgtggttaagtatgtttcaccgccactttcttcttataatattgatcaacaagagatgattgatatggcattaaatatgctaacgaatctgattattcaacctaatcgggcacacattgatgtaaatatgaatactaatttagttgtgcgcaagagttttgtgcctaagaagtaaattaattagtaaataaaaatattttttagtaatactatcaaaagagaatgctaatttaatgcgttctctttttgtttagctttcagtaaagaatttattaaatataaataaattctttacttaacaaaaatagagaatatactaaactgtgtaaacgattacaattaatgattgctttagggggcaaatttatgacacacagtgacaagtcagggaagcagattctttcctacgcatcattctgtttgggtaacttaggtcactcggctttttatggtgtgatgagtacatattttattatttttattactagcagcatgttcagcggacttaatcagtccgttgcagataagctgatcggcttaattacaggattgatggttgtaattagaattgctgaattggtaattgatcctattctaggaaatatagttgataatactaaaactagatggggcaaattcaaaccttggattttaattggtactttagtaagtgccgccttattattagttttgtttactggcatttttggattagcacaaaaaagttggattctctttgcgattttatttgtactaatttatatcagttttgatgtattttattcattatctgatgtttcttattggggcatggtaccagctttaagtgaagattcacatgcacgtggtatttatacttctttaggtgccttttcaggaacaattggttggaacggattaacaattattgttgttccattagttacagctgtgacttatgcggtaactggtaaacatgaggaaggtgcaccaggttggttagcatttgcggcagtaatttcagctttggcaattgtatgtgccttgattgtttgtttcggtactaaagaaaagcataatattattagaaactcagctaagcaaaagactagcttaggtcaagtgtttggagcaatttttcataatgaccaaattttatggccaagtttagcatacttgctttactcattagcatatgtaattaccaatggtgttttgttctatatgtataaattcgttattggtaagccaaatgacttctgggtagttggtgttattgcaacaattatcggtttctgtattagtccaatgttcccaattctgaacaaatacattccaagaaaatggttattcatcgctggacaaacttgcatggttttagcttatgttttgtttattttcggcagagacaacgtatttttgatggacttgggcttggttcttttaaacattaactttgctcaattggtaactgttttaacattaactgacgcaattgaatatggacaacttaagaatggtcaaagaaatgaagctgttgttttagctgttcggccgatgattgataagtttaccggtgcggtttctaatgctttagttggttatattgcaattgctgctgggatgaccggttctgcaactgctgcagacatgactgctcatgatattagcacctttaatatggtggcattatatatcccacttgctttggcagtcttatcaatcgtagtctttttgactaaggtaactttatctgaaaagaaacatgccgaagtggttgaagaattaaaagatcaacttgcagaaggtaagattgaaaagaatgaatctaatactcaagttagacctcaagatcagactatctatgctcctgcagacggtaagttaatgaagatggcagaagtaattgacgaagatggtaagccattcccaggaaagggttttgcaattaaaccagattcaggcaatatttatgctccatttgatggtgtagttaggttcacttttggtactaagcatgcttttgaaattgtttcaaataatggtttacaagtagttgttcatgtcggcttaggtacagttaacttgcgcggtgaaggttttgaaacttattatgatgatggtcaaaaggtaaaaaaaggtgacttgctgttagagtttgatcgtaatttagctcttaagaatggctatcaggacactgtagttaccttctatacacaaccaggacgaattgtaaaatctagtgaaattgaagctggtaagattgttgagcatggtgaaaaagtattagatgtacaatttaagtagaggaattacaatgacacagttaaaacgttttttatatggtggggactataacccagatcaatggccagaagacacttggtcagaagatattaaagtttttaaaaaagcggatttaaattctgctacaattaatgttttttcttggagtttgcttgagtcaagagaaggccaatatgatttttcaaaattagatagaattattcaagaattgtctgatgcaaattttgatattgtacttgctacttctactgctgcgatgccagcttggatgtttaaaaaataccctgacgtagcgcgagttgattatcaaggacggcggcatgtctttggcgcacgacataacttttgccccaatagtaagaattatcaagttttagctagtaaattagtcgagaaaattgccgaaagatatagtaataaacctcatattgctgtttggcatgtgaataatgaatatggcggcaattgctactgtgaaaattgtcaaaatgcttttcgtacttggctcaagagtaaatatcaaacactagataacctgaatgaggcctggaatatgaatgtgtggagccatactattcatgattgggatcagattgttgttcctaatgagttaggagacgcctggggaccagaaggtagcgaaaccattgttgccggtttatcaattgattatttacgttttcaatctgatagtttacaaaatctttttcagatggaaaaatcaattattaaaaagtatgatactaacactcctgtaactactaatttccatggtttaccaaataagatggttgattatcaaaaatgggctaaagatcaagatattatttcttatgattcttacccaacctacgatgcacctaagtatttaccagcatttttgtatgacttaatgcgtagtttaaagcatcagccatttatgttgatggaatctgcaccgtctcaagtcaattggcaaccatatagcccgctgaaaagaccagggcagatggcagccacggaattgcaagcagttgctcatggtgcagatacggttcagtttttccaattaaaacaagcagtaggcggctcagaaaagttccatagtgccgtaattgcccactcacaaagaaccgacacgagggtctttcatgaactagaagatttgggtaaaaaattaaaaaagattggcccaactgttttaggctctaaaactaaggctagagctgctattgtatttgattgggataacttctggtcatatgagtacgttgacggtattagtcaagattttaattatatggaatcaatcttagattattatcgccaattttatgaacgcaatattccgacagatgtaattagtgtcgatgatgattttagtcaatatgatttagtagttgctcctgttttatatatggttaaagcagggctaagcaaaaaaattaatgcttatgtcaaaaatggtggcaactttgtcactacctatatgtctggaatggttaacaatagtgataatgtctatcttggtggctatcctggcccgttaaaagacgttatgggtatttgggttgaagaaagtgatgcaattgtaccaggacataagacaattgtttcactaaatggcaaggattataaagcgggtttggtttgtgacttgattcatccagaaaatgcaaaagttttagcaaagtactccaatgagttttatgcaggaacggctgcagtcacggaaaataaatatggtcaaggtaaggcctggtatgttggtactaagttggatcacattgggttgacgcagctattcaaccatattgttttgacagctaacgttgaatcattggtgggcgacagtcataagttagaagttactaagcgagttactcagtctgggcaagaattatactttgttttaaatatgagtaatgaagaaagaaaattgccacaaaaatttgtagagtatcaaaatattttaactggtcagcaagctcatgatcaaatgaaggcatgggatgtacaaatacttgttaaataaatgattttttccttaatgaagacaagaagttagacaaacgatctagcttcttgttttttacttaaataaatattttatttatttaagtaaactatttactaaaagatactgaagagatatactaataactgaaaacgattacagaataaatttgaggtaaaaacaatgaataaggaagaattacttaaagaatatgagacaacttttggtgaaaaaggtaaggatgtctttttctcacctggtcgaatcaacgtgatcggtgaacacactgactacaatggtggtcatgttttcccagctgcaattagtttgggtgtttatggtgtttacggcccaagagaggataaaaaagtttgcttgttttctggcaatgttgatggcgatatcgtggaattcgatattgacgacacaactgttgagaaagatgatcgcttttgggctaactacttcaagggcatgattacgtacttacgtgaaaaatatgacaacattgatcatggttttaatctttatatcaaagccaatttaccatcaggttcagggctatcatcaagtgctgccattgaaatgctaatgggcatcattttaaaggatgaatttaacttagatgttgaccggattgctttagccaagatgggtcaaagaacagagaatgaatttgttggcttgaattcagggattatggatcaatttgcctgcattatgggtaaaaaagatagtgctatcttcctcgattgcaatacattagattatgagtataagccactcgctttaggcgattacgaaattattattatggcaactaacaagccacataccttagccgattctgcttataatgatcgtgttcgtgaatgtcatgatgcagtgaagaagttgcaggctaagttagatattaagactttaggtgagcttgataatgatacttttgatgaatatgcatatctgattaataatgaaactgaaattaagcgtgctcgtcatgctgttagtgaaaaccaaagaactttgcgggcaacaaaggccatgcaagatggagatttggaaaaattgggacgtttgattgatgcttcacacgtttcacttcattacgattatgaagtaactggtcaagaactagatactttagctgaagcttcatgggctcaacctggcgtcttgggtgcaagaatgattggcggtggcttcggtggtagtgccattgcaatcgtcaagaaagaccaagctgaggcatttaagaaaaatgttggcaagatttaccgcgacaagatcggttacgatgccagcttctatgatgcggaaattgttgatggaactaagagaatttaatcaaacaagaggataagtatgaaagttattgaaaaatttgcggatgaagttattaatagtggagcgtatgagccgctcgatcgcgtatatgtgattaacaaaattcgcgctttagttggcgatgaggcaagtagcgttgaagctaatgatgaacaaacttcagttaagcaattagttgatttagccgtgcaaaataaaaagatttcggatgatgttacttcacgtgaagttttgaatgatcaactatacgacttgataacgccaacaccatctaaaactaatggcatcttttggcaaaaaatgcaaaaatcacctgaaaaagcaacagattggttttataaactttgcgaaaacaacaattatgtcaaaaaggaagcaattgccaaaaatgttgtattctcagggaccagctctaaaggacatggcttagaaattacaattaatttgtctaaaccggaaaaggatcctaaggcaattgcggcagcagctcatgcaactggtaagaaatatcctcaatgtgcactttgcctagaaaacgagggttaccttggtggatatggcaaaaatgctcgttcaaatttgagaattattcgcatgaatattggtggccgcccttggggatttcagtattcaccatatgcttacttcaatgaacattgtattttcttagatcaaaagcatattccaatggtcatcaaccaacaaactttgattaatttggttgaaattgaaaagacgttaccacattattttgttggttcaaatgctgacttgccaattgttggtgggtcaatgttagcacatgaacactatcaaggcggacgtcatacttttccaatgatgaaagctaagattaagaaaaatgtagtctttgatgattatcctgaagtggttgctggcattgtcgattggccaatgagcgacttgcgcttgattagcgataattcgttagatttgattgaattgggcgctaaaattattaatttctgggatcattattcagattctgctcgtcaaattaaggcttttgatggtaaaacacgtcatcatactgtgactccaattatgcaccgtgaaggcaagaacttcgtacttgatctagttttgcgtgacaacaacactagtgaaaattatccgttaggtattttccacccacataaagaattgtggcatattaaaaaggaaaatattggcttgatcgaagtaatgggccgtgctattttgccaggtcggttaaagagtgaacttgaagaagttaaaaaatactggttgggccaagataataagatggctattagccacaaagaatgggccgatcaaattaaagcagagcagaatattactgccgagaatgttgacgctgtgatgcagcaagctttagttgaagtctttgaacaagtattgcaagatgccggtgttttcaagaataatgcagatggcgatgaaggctgggataagttcattaccgctttaactaggcagatttaactcatcaatgtgtaaaacgagatctgttggatctcgtttttttgttagcggtaactcatatattctgatggttaaataatttataatatttatgaaagcgaatacaaaagagaaactgtcaaatcttttgtgtaaatagatctttctcgtaaattgattttttaattatttatttaatcaaagtaggattctaaggtgtcctgaacctgaccaaagcctttatgaattcgattgaaataacggtcattgtagctcattgcctgaatgccaataaaagcatcaagcgactgttcagttggaaactctgccttaggcttagctttgcgcttgatcacattgttaaatgattcaatcatgttagtcgaataaattgaagctctgatctgcttgggatagttataaaagaccagcagatctggttctatgtctttcaagcttctgataacatggctgtaaaccttgccccatttggtatagaagtcatgcaggacagctgtggcttcttctttgtttgtctgttgatgcacctgtttgaattcgttcatgatcttttcacgatcgtcgacgcgtactttagcgcagatattgcgcatgacatgaaccaaacagcgttgaaaatgagctttaggataagtcctggccaaggctgttttcatgccaacaacaccatcagaaagaaaaagctcaacttgctttaagcctcgggatttcatgttttgaagcatatctgtccagacttcaatgttctcgctaggtgcaatgcagtagtcaatgacctccttgtgcccattaggcttgatgccaatggcaatatagactgcttcacgctcaaatgtttctcggcgcaaaggaaggtatgtcgcatccaaatagacgcagaaaaacttgtcgcttagcttgcgtttgtggtaagcctcaacctttggaatcatctgcttggaaatatttgatacctgagctggactgtaatggctgccatacatcttttcaattagatcggctatttccctggtggtcacgcccttggagtaaagcttgataatcatgctttccaagatatccgagtgctgcttgtagtcaggcagcgtgtgctgatgaaattgaccgttgcgatcccgaggcacttgcacttcaattgggccaaattgcgtatcaactttgcggaaataagcaccatttctagagttgccagtattccagccatttctggcatagggatcatagcccagaaaggcagtcaattcagcttctaacaagttattaacagcctgttgtagctctttgcgcaataaatcatttattttgtctggattgaatagagcttgagcaaaatctttggtaaaatcattcatgaaggagttcttctttctgtatgtgtttttttgttcaaaccaatcatacgagaaaggaactcctttttctaatgtttaaagaaataaatttaaggaatcattcatccttacacaaactattttacagtctcacaaaagaagggcaagagtatgaagacaagttttagaaaatatggcagaaaagataataaagatctttgtgaaatcacactagagaatgatcacggtatggtagttaaggtattgaactatggtgctacattggaaaaggtgttgcttgatggtgagaatatgattttgtcactggataagccagaagattacgacaaggagcgtaattatctaggcggtacggttggacgtattgccggaagagtgagacgaggtttatggcggcacggcttagaattacatcaattaccaatcaatgaagggcctaaccacattcatggtggtattgggactgatactgaaatttgggattttagacctagttgtaatgaaaaaggtgctcgtgttgatttaacactttttgatccagatgggcataatgattatcctggtaatttaaaattacacgctcgttatgagttagataataacaatattctgcattattcattgggtgccatgagtgataagctgactatttttaatccggttaaccatactttcttcactttaggtgaaaagaaaatgattaatgacttgcaactgcaaatgaatgctgattattatattccagttgatgagactggcttgcctgatcgtggtatggaaaaagttgatggaacagcattcgattttagaaagaagaagcgagttggggatgcattggaagctgatgatccgcaaattaagaaccgcgatggaatggatcatccatttatcctggatggcaatatgccaaatgcagtgctaacttctgctaaacacaagttaacggtaacgactaatgctccatccttgattctttatacaggaaatggatttgatcatactggtaaatatacggctgattttggtccatattgtgggattacgtttgaagctcaagtgccgccagcagaaggtgatgatttgggacgcatcacgcttttgccaggtgaaaaatttaagcggactgttgattggaaatttgaataaaaatatggagaacatccttactgaatgaagtggtagggatgtttccttcttttggatattatgatttgattttacaagtaaatctatattaatatttaaaatatttagaaatcaactgaaaggtatagtaaaaatgatgacaaacgaaaagattattgctttagtcaaggaagaatatctaaacaagattccaaaaatttttcgcaagcatgctgttgaaggcacttgcaagttaatcgctagagaacatcccgatttatacaaggcttttgaagatggtgaaccaaccgcagaagaaaaacaacaaatgacagagttgattaacgggattttcgaacaaagaatgaaaaagcataagatgttataaaaagacgctggaatgtaatgattattagatcgctacattctagcgtttttttgattttaattttgatttattaaactaacaggtagcgtataaacactttctaatgaaacagagggatcattaatttgacgtaaaagtaaatcgcacattaattcagcaatttcttttgtatgttgccgagcgctaattaaatttggaaaaagactttgaatcaaatgactaccatcaaatcctgtgattaaaggtacttttcctaaataatcagcacattctttagctagtaaagctgtaatgtcatcggtacaacaaattgcatcatattcgtcatcctttaaaaattgaaggatggctatttttttagcaataattgagtcactggcactgagtgagcgaagatcgaatttagaatcaaaagtgttaaatacgcgaatcattcctttgattcgatcacttattgggtaatagtcttctttagcaccagcaataataataattttctttttcttttgttttagaacagattgtgcgatttgcatacctgcgtcatagttattagattgaacagttggtatttgaggactaattttacggtcaaagctaacaataggaaactttatttttagtccttttttaggaatcttaataggagagctggtgatcagtccagcgatttccttttgtttaaatcgctctaaatagtaattaatatcttgggattgatagtgatctagatgaagaatacaatcgtatcctttttcctgtaaataaaaggctagatattcaaataattcagaataaaaaggattattaatttttggaaaatcaacctcgattaaatttaatttagatacagagttgacggtaccttttactttatatcctaatttttttattgcttctttaaccttaagagcagattcaatacctacatatccattttgattaatatatcttgaaactgttgctatcgaaacgtttgcttctttagctatatctttaatagtaactaccatattttttcacttccttatgtaaatattacacatttaaaatcctatatcatagtattttgacttatttaaatgtgtaaatttgtgtaaatccattgaaaactgtaaatagaagtgtatgatgtaattgtaaatatgatagcgcttacttaaatagagcgatatttgatcaagaggagtgaaaatttatgaaaaagtggctaaaaagaatagctttaattagcttagtcgctacgatggctttaagtttgacagcttgtggtcaaaataaaagcagcaattctggtaaaaaagtgacaattgagtactttaaccagaaaaaagaaatgtcagcaactttgaaagaaattatcaaagactttgaaaagaaaaatcctgatattcatgttaaagaagttgacgttcctaatgcaggtacggttttgaagacaagaatgctttcaggagatgttcctgatgtaattaatatttacccacaaaatattgattttcaggaatgggcaaaagcaggttattttgaagatatgactcatgcttcatatattaaaaacattaaaaatcactatgctgattcttttaaaattaacggtaagatttacaacgcactacttagtgccaacgtttacggtttcttctataatgcaactgaatttaagagattaggaattaaagctcctaagacttgggccaaatttgaacaaattgttaaaaaaatcaaggctagtggcaaggcaccatttgctgtagctggtactgaaccttggactttaaacggatatcaccaattatctttagctactgttacaggtggtgctaagcaagctaaccaattacttaggttctcagcgcctaacggcattaaagtaaacaatccttatattcaaaaagattttactagattgaacttacttcgtgaaaatgcacaacaaaattggcgtggtgctagttacaacgatgctgttgtttcatttgctaatggtaaaagcttgattatgccaaacggttcatgggcattacctatgatcaatcaacaaaagccaaaatttaaggttagaacatttgcttttccagcagcaaaggctggtcatgaaatgacagttggttcaggcgacttagctttgtctatttcatcaaagagtaagcacaaaaaggcagcagaaaagtttgtagcatatatgacaacacctgctgcaatgcaaaagtactataacgttgatggaagtcctgtagccgttaaaggtgtaaagcaaaggggaattaattctcaattgggaggcttgtctactttggctttcactaaacacgatatggtttggttagcacaagactggactagtgagaatgatttcttcaatttgacggctagttacctgatgactggtaataagcaacaaatggtaaatgatatgaacaccttcttcaatccaatgaaggcttctaactaggaggattaaaaaatgaaatcaaaaagttttattgaaaaacattggggttggttgtttttaatcgttccattgattttacaagcaattttcttctattttccactatttcaaggtgctttttacagttttactaattggactggtttgacttataactacaagtttgtaggaattaataactataaattattgttgatggatcaaaactttgctaaatccattggttttactgcaattctaactatttcattgattattggtgaaattgtaataggtattttagtagctagagcattaaactcaaagatcaagggtcaaacattctttagagcctggttcttcttcccagctgtattgtcaggtttgacagttgctttgatttttaagcaagtattcaattatggtttgccagcaattggtaatgcacttcatattgaatggcttcaaacaagtttattaggtactaatactggtgcggtaattgcaactattttcgttttgctttggcaaggtgtggcaatgccaatcattatctttttagcgggtttacaaagtattcccgatgaaattaaagaagctgcggagatggacggtgctaatagtcgtcaaatcttctggaacattgaattgccatacatgttaccaagtatttcaatggtctttattttggcattaaagtcaggtttgacagccttcgatcaaatctttgcaatgactgcgggtggtcctaacaactcaactacttcacttggtttgctggtttataactatgcgtttaacaataactcatttggttacgccaatgcgattgccattgtcttgttcatcttaattgctattgtttcattcattcaaattaagatttctaacaagtatgccgttgattaaagaggagtatcaaaatggaaaaagaaaataaatcaaagaagttttgggattatgctttactgattgtcggtggaattctgattttaattccattgctctatacatttttaagttcatttaagacaactaagcaaattatgaatcatttctttgcttggccaaatccatggacatcagttaactttcaaagattgtttgcggatggagtaatgggttacttctggaactcaattgtcattacggttttatcaattgtcttagtaatgattttcgtcccaatggctgcttactctattgctagaaatatgtcaaaacatacagcctttaattggatgtatatcttgctaatcattggtatcttcgtaccattccaagtaattatgattccaattactgtcatgatgagtaaaattggcttagctaatatgtggggcttgattattctgtatttaacttatgcagttccacaaacattgttcctttatgtaagctatatcaaacagagtgttcctgaaagtttggatgaagcagcagaaattgacggtgctaataagattaccgcatatttcaagattatcttcccattattaaaaccaatgcatgcaacaacattaatcattaatgcaatgtggttctggaatgactttatgcttccactgttaatcttgaacaaagattcaaagatgtggacattgccattgttccaatacaactatacaggccagtatttcaacgattacggtccaagttttgcttcatatgtagtaggtatcatcacaattacaattgtttacttaattttccaaaagaatattattgccggtatgagtaacggtgctgtgaagtagttaagaatagagacgaggttttaacaatggttaaggtagatttagatcacgtatataaaaagtatgatggtaatgataagtattcagtaacggactttaatttacatattaaagacgatgaatttatcgtttttgttgggccatctgggtgtggtaaatcaactactttaagaatgattgctggactagaggatatttcaaagggtactttgaaaattggtggtaaagttatgaacgatgttgctccaaagaaccgtgacattgcaatggtattccagaactatgctttgtatcctcacatgtctgtttatgacaacatggcctttggtttgaagttgcgtaagtatagcaaggaagatattgataagcgagtacaacgtgctgcaaagatcttgggcttgacagattacttaaagcgtaagccatcagcactttctggtggtcaacgtcagcgtgttgctttgggacgtgcgattgtgcgggatgctccaatctttttaatggacgaacctttgtcaaacttggatgctaagcttcgtgtaacaatgcgtgccgagattgctaaactacaccaacaattgaagacaactactatttatgtaactcacgatcaaactgaagctatgaccttagctgatagaattgtcattattaaggatggtaagcaacaacaagttggtagtccacttgaagtatataacaaaccagctaatgtctttgttgctggttttatcggttcgcctgctatgaacttcttccatgtaattttaaaggatggcaagatcattgataaagataatcatgacttcgaaattccagttccagaaggtaagttaaaggcattaaaagaaaaaggatatgacggaaaagagttgatctttggtatacgtccagaagatgttcatactgagcaagtatttttagaaacctatccagacaatgttgttgaagctaaagtggtagtttcagaattgttaggtgctgaaactcagctttatactaaagttggtaatactgaattggtatcgaaggtagaccaaagagactatgctaagcctggcaatatggtaaagatgggctttgaaatgaataaggcgcacttctttgatcctgaaactgaagtagcagttgagaactgaggttaagtaatgactaaaaacttaattacatttgatgaaaaaaataaagtttttcatttgcataatgaccaaatttcatatctgatttcaattgaagatggtggcacactaagtcacttgtatttcggtaaaagtatcaaagcatatcatggtgaattgcggtacccacgacttgatcgaggcttttcaggtaatttacccggatcattagatcgtactttttcaaaagattctttgccacaagaatacagtagtgcaggcgaaatggactttagaacgccagcaatgattgtgcgccaaccagacggttctaatgcagtatttttaacctatgaaaattatcaaattgtgccaggaaagcctgaactaaaaggtttgcctcatgcatgggtaaagaataaggatgaagctgaaactttaatcattactttaaaagataagtttagtgagctgagatttgacttgctttatacaatttatcgtgatcgttcggtaattgtgcgttcgactaaagttagaaatgctggcaaggaaacggtaaaaattgaaaaagtagcttcgatgcaaatggatttcgtagatcgtgactttgacatgattacactgccaggtgcccatgcgcatgaaagacgggttgaacgaaacaaggttaatcaaggaattcatgtttattccagtattcgtgggacatcaagccatcagatgaatccatttgtagcgttggctgatccagatacaaatgagtttgatggggatgcatatggtttcgcctttgtttactctggcaatcacaagtttgaagtagaaaaagatccgtatgcgcaaaccaggattgttgttggcattaatgattacaactttagctggatgctaaatgcgcaagagagtttccaaacacctgaagtattaatggtttattccgatcaaggtttgaataagatgagccaagctttccatagtatcattcatgatcgcattatgcgaagcaaatacaaagatcaggttcggccaattgtggtgaataactgggaagcaacttacttcgattttgatgaagataagttaaagccaattgttgataaggctaaggaattaggcattgagatgtttgtgcttgatgatggttggtttggccatcgcgatgatgataattcttccttgggcgattggcaggtctttgagaaaaaattccctcatggcctagatcactttgccaattacgttcatcagcaagggcttaagtttggtttgtggtttgaaccagagatgatctcaattgattctaatttgtatcaaaagcatcccgattatttgatgcatgttcctggaagaacaccaagtccagctcgtaaccaatacttgcttgatttaggccgagcagaagtacgtaataatatttttgaccaaatgaaagcaattcttgactcaggcaagattgactacattaagtgggatatgaatcgccacttgtctgatatttaccaagctgatttgccagcagatcgacaaggcgaagtctatcaccgttatgtattaggtctatatgatttacttgaaaaaattgttgatcgttatcctgacctcttaattgaaggctgctcaggtggtggtgggcgttttgatgcaggcatggcctattacaacccacaaatctgggctagtgatgatagtgatgcaattgatcgcttaagcattcaatatggcactagtttagtctatccacaatcaatgatgacttcgcacgtttcggttagtcctaatgagcaaaatggccggattacgccgtttaagacgcgtggtattgtcgcaatgtggggggatttaggttacgagcttgatttaactaaattaagcgaatcagatcaaaaggctgttgctgagcaagtagctgaatataagaaaattagagcagttactcaatatggtactttttatcgcttgaaaaatgcgcaagaaggcaaccaatgtgcatgggaaactgtttctcctgataaaaacgaagtagttttatcaacagttaaggtcatggccagtgcacagccatactttactaaaacaaaattagttggtcttgacccgaataagcagtatgaagatcaggcaagccaccaagtatatggcggtgatgaattgatgaacctaggaatttatgatccggttgaacatggcgatttcatggcttatcggtatcactttaaagcaattaactgaggaaatttgtgatggcaattaagaacaaagtaatgttgattacttatcctgatagtttaggtaagaatctaaaagaattaaacgaagttttacataaagacttaaaaggcgcagttggtggcatccacttattgccattttttccatcaactggtgatcgtggctttgcgccaactgactacactactgtagatcctaagtttggcgattgggctgatgtcgaaaaattaggtgaagaatattacctgatgtttgactttatgattaatcatatttctcgtcattctaagtattatcaagattttcaaaaaaataaggatcaaagcccttatgctgatttattcctaagctgggacaagttttggcctgaaggccgtcctactcaagctgatgttgatttaatttataagcgtaaggaccgtgcgccttatcaggaaataacctttgccgatggtaccaaagagaagttatggaacacttttggacctgaacaaattgatttggatgttcgtcaaaaagtaactcaaaagtttatcaaagatactttaactagtttagtccaacatggcgcagacattattcgcttagatgcctttgcttatgcggttaagaagctagatacaaacgacttctttgtcgagccagaaatttgggatctacttaaagaggtgcaagctgatttggctggcgagggtgcaaccattttaccggaaattcatgagcattattcaatgccattcaagattgctaagcatggctactttatctatgattttgccttgccaatggtaactttgtattcactgtattctggcaagagcaatagtcttgccgcctggcttaagaaatgcccgatgaagcagtttactacgttggatacgcatgatgggattggtgtagttgatgctcgtgatattctctcccctgaagaaatcgactataccagtcaagagttatatgaagtcggcgctaatgtgaaaaagaagtattcaagtgctgagtatcataaccttgatatctatcaaattaatactactttttattctgctttaggcgatgatgatcagaaatacttcatggcgcggttattgcaagtctttgcgccagggatcccgcaagtttattatgtagggatgctggctggcaagaatgaccttgaattactggaaaaaactaaagaaggtcgcaacatcaaccggcattattacagccgtaaagaagtggctgaggaagttaagcgtccggtcgttagttcgctcttaaaattatttacgtttagaaacaatgaacctgcctttgatcttgatggttcaattgaagtctccactcctaatgaaaatgaaatccaaattattcgtaaaaataaagagcaaaccagccaagccgaattaaaagctaatttaaaagatttaacttataaagttgtagttaacggtcaagaagttaaattttgatcttttccccctctagatgaaaaattaaacaatattaatataaataagcaaccttgctcaattttagtaatggttgcttattttagtttcttgtgacttatcacaaaatatattagctttattcaaataaaaatcaaataatcttgttatgattaaaaagggaagaagggataaacgttgaatatttatgggaaatacgccccaactttagataaattacttgatcaaatgatgacgcaatttgagcagttaaataaaaattatgaaaaaggacatggagaacgtctctatgaacatttacgtggtcgggtaaaaagtgaagccagtatggaaggcaagtgcaaaagaaaagatttaccgttaacgccacaatcagctttgcgtgctaatcgagatagtgttggattgcgtgttgtctgcaattttattgacgatatttatacctgtattgactttattaagcagtgggataatgttaatgtttatcaggaaaaagattatattactaatgctaaaactaatgggtatcgttcatatcatatgatttttgacgtgactgtacctgatgaagatgttgacggcaatataccgggtcattattttgttgaagtgcaattaagaacaattgcgatggatacttgggctagcctggaacatgacatgaaatataaacaccagattaagaatcctgagatgattggcaatgaattaaagcgagtagcagatgaattagcttcttgtgatgtgtcgatgcaaacgattcggcagttaattagggaagaggattaatgagttaatgaagattttagtagcagaagatgaaccgcaactattgcgggttttaacagtggccatggaacacgcgggttatgatgtggatccggtagataatggcttaaaggcagtcgagcatgctaaagaaaattcttatgacgtaattatgctggatatcatgatgtcagtcatggatggaattacggctttgaaaaaattcgtgaaagtggcgataagacttatattttaatgttgacagctaaggccgaggttgatgaccgagtaactggtcttgatagtggtgctgatgattatctgactaagccattttcacttaaggaattgttagcgcggctgcgttcaaaagagcgccgtgaagatgactttactcctaataagttggaattaggggatgtaactttgaatgtgactaagcaggagttggctagtcataattcaattcgtttgagcgggactgaaactcaattgatgaattactttttgttaaatcaaaataaggaattatcaacagaagagttgcttaatcatgtttggaaaaatgatcttgatgccaatagcgaggtagtctggatctatgtttcatacttgcggcaaaaattgcaatcaattcaaagctcagttcgaattgaaggcgataaaggtggttcatataagctagttaagtaggtgagcagatgattcaaaaatttcggtggaagtttattggtacttctgttgctgccttgtttgtagttttgttgttgacgttaggcggcttagtttgggtgactcatgttcaaagccaaaatgaagtcgatcgcgtgctaacggctttggtcaaaaatgaagggcgtttgtcaccaaaaaatgccaaaccagcctttggcgatcaacatgatccaattaatcgcaattttttaggtgggcagtataatcccgaagcggtttatcagtatcgctattttgcggtaacaattgatgaaagccatcaggtacatgtaattaatgataataacgtttataaaattaataattccaagatacagactattaccagatcagctttagaaaatggtgataaaagtggtgtagttgccttaggacaaaatcaatatgcctttagggttgtaaaaaattctactggtgaaatgatgattgtttttttgaatgaaactctgatttttaaccgtttttggttattatttagagtagcgttagttttaggcttaggcgctttgattgtctttgctttagttttgattttagtttcgggcaaggcaattaagccaacgattgatgcttatcacaagcagcaggaatttattaccaatgccggtcatgaattaaaaacgccactagcagttatttccgcgaatacggaaatggaagaaatgctgggcaataattctgaatggaatgaaagcaataaagagcaggtggctaaactaactaagttaatcaatcggttgatttcgctggctcgagctggcgagacgggtgagcttaccttaagcaaagttagcttttcagaaatcgttgaagaaacgactaaagattttaaatcagtcatgaagaagaatgacttagtctaccaagtatcggtgcgggaaggcttaaatgttttagctgaaaagcatactttagccgaagtagttaatattttgctagataatgcgcaaaaatattgtgatcctcatggcaagattcaggtgaaactgactaagggcggaactttaagcaaatatgcggtcttgcgggtagaaaatacctatcgtgaaggtaaaggcaaagattacagccatttctttgatcgtttttatcgcgatgatgagtcgcataattctaagaaaggtggctttgggattggcctggctatggcgcaagagttagtcgaagcctttcatggcaaaattttagcccaccacaaaggtgaagacattgtttttactgttagtttaaaaattgctaaatgatcattctgtgatagttgtataattagagcagaattgggggatcattttggcgaagagaaaatcaatttataccaaagatgttgtcctagttatggcagcatctttcttttttatgtttagtacaatgtttgttaatcctttgatcaatggctatgccaaagaattaggcgctagcagtgcttttgcgggaatcattgttgggattatgagcttagccgccatgtttttgcggccggtagccggtaatttgactgataaattttctaaataccgcttatcatttattggcggcgttttgatttttatcggagtcatggggtatgttttgactctatcaagtggctggcttttgctttttcggctgattaacggtactggttatgtcctttgcacagtttgtatgactacttggctagcctttttagtgccgcgccaacacgttggtgaagcaatgggcttttatggcttaatgaatgctttggcaatggcgttagcaccagcagtttcaattaatatttatcaaaaaataggttatcgcacaagcttgctagcatcagctgtttctgctttattaatgattgtggccattcagtttgtgggtgatcatgctttgcctaaaaagcgagttcgaacgcagaagaagagtttcaaaattatccagtttaatgttttaccggtagcaattttgacaactttatttgctatcccgtattttgtaacacaggcagatattgtaacttatgtagaacaaaaacatctgactgtcgcagttgggtcatatttcttgatctatgcggttgttttgttgattattagagtaggactaaaaaggtattttgatacagtacgttttggcgtctggttttggctaagtctagtttcaacggctgcttatattatcttgctcgcaataatgaataatgattggcaaatggctttagcggcagctttaatggcatcaggctatgggatcatttattcagttttgcaatcaactgcgctgttgttagcaccgattgaagaacaaggcttagctagtgctaccttttatttgggactagacattgcgatggcctttggccaaatgatcagtggtgtaattgattctgctttaccgatagaatggttctatccagtagaattagtcttagttccattgattttagtagtttatttcatttggcgtaagcgtttgaatggcgcaattgaccatcattagagggaaaatatgagcgaatatgtagttaaatctaagttagaagataaagaatggcaaattgccaaccaagtacgtgatcatgtttttgtttgtgatgatgttaaacatgatgcaggtcccaacccagttgagtatctatgtagtagtgttaattcatgtattgtaatgtcggcagggatgattactaaagcacatcaacttgatgttaaaaattttagggtagaaaaccaggcaaaaacggagaatctcggtcatggtaaatcagtagtaactgagatgaagatcaaggtcttctttgattcggcaatgactagagccgagaaggaagaatttttagctcatactttgcatgtttcaactgtttatcaaactattaaagcagctgtcaaaatttatgtggaattaggaaaataagcgatgagcgagccatattacaaacaagaataccagggtgaaagaaagttagatggtgaggccccagtttttagttttgatcaaattatgaaagaaacttttctgcgaccatttatctggaatgcaagaactaccagaagaagtttctggattggaatcgttattactgaagttataatttggattggtggaattattacatttttggcaactgttatgccagtttctcactatgagaatgattcagctgatatgataaatggttttgcttttaatggtgatcacgcttcgatgattgtcattatcggtatgattatttggggcttgatctatctttatttgaaattatgccaattaggcctagccgtaagaagattgcatgatatcaattatacaggttggtggattctgttaatgctgataccgttaggttggatttttgttctgtattttgcaattcagccaagtaaacaagagccggtgaaatggggaacgtatctttaccttgacgaataataaaaaatgttataatttaactataagagattacgttaggagattatatcgatgaaaactaagaatttatttacttcattagctgccgcagtgatgatttcagctggtttagctggtgcaggtgtgtctgctgcagaaccagttcatgcagcaactacacaaacttcaagcaaaaaaggtaccattagtattaagcgtagatcagtatcagctacagttaataatgctaatcctaagctttacgctgtaaaccaagatggtaaaatcgtaaagtcaatggattcaaattatactaaaggtcaaaccatccagctttacttttctaacgaggctaagaacgatcaaggttctgttactttctattatgttgacagtcaaactgtagatggacaacaatgtgcaatttatgttgtttcgactgatgttaccccttcagcaacagttccaagtcaagcagactggtcaaagcaagcacaaagtgacaaaaaagccattcaagatgcttacaacaatagagcattaaagtacatcgttgtttcacctaagtcaaaaaagggtgcaaagatctactacgcatataagaagagtgctaaggctaaaaaggtttactttaaggcaaccaagaagaagatcaagtacggtaagaagtacaagtcatcgatgatcgttaaaaacggtaagagcagatatgcttatattggtaagaagagatacttaaagacctctactattaaagtagtaagtgttaagtacgcaccagttcaattatcagatgatttgaagaacttaattgttcaaaactagaaaaagttaataaaaattgtagcgtaaaggatgaattattgtcctttacgcttttttgatctaaaaattaataataataatattgataaaaaaactcactgacctacaatagactttgcgttatttttagggagttgtaaaaataagaatgaagagagtaaaagtctatttaggattagcttgtttgatgacgttattatgtttgaagccgcaaatggtttgggcgcgagaactaaatccatttcagactaagatgattaatccgcatacgtcttatagaatttatcaaaacttaactcgtaaaggtccgtcaagaagtctatgccttgctaatacgtttaaacatggcaatgttcaagccagtgcagttagaaaagttcgcggcaataagtattgctatgtttggttagacggacatagaggcggttgggtcaatcagcgagcttttttaagaagaaaaattgcagttgtacatcagattagtttagtgaagaattcgcattatagttttccaactagggatgcgattaattatgcaacagatgcagcaggaacgataattgagccaagtaaagttaaagtatctcgagcagaagtttcatcaagtaaaaaggaaagctatcgggtaagttattcttatggtaaagctcatgctcagacagttgttcaagtgagagctaatgctagagagggcattgttaaagcaaccaaaaaaccacaagctggagacagtgctcgtagctggttcaagcactataagacgtctggtaattggggcagaagttttgcgccggaaactaaatcgcatgttttaaaaagtgttcattttaaactgaaaacctatttctatcaacctgcgactttatgtcaaagtgattcggtaactgggacggtgggactagtaccagaaggattgaccgtgtcaaatggttcaatgtatgccacaatgtatcattcacctaatgatacgcgtgctcacattgtttcttacaaatttaatcaagtgcctaatcgctatactatgcaaaagttgccatggctaccttggtcacaatttctgcggcttgcatcccatgttaagataagcccatatattaaattgggacatggacaagcaatcggttcaactcgaaagtatatttatgtgattgctaataaccatttattgcgcaagagctctcaatcagaagaaattatgcagattagtaaaaacaatttgcaaattaaacagatttggacttttaaagtttggaatcattcagctagaacaggtcgttatttccataatgctacttttgtaaatgatcaccaatttattgccgtttaccatgatgccacagaccaccgttttgaatattgggaagttactcgtcagggtaatagttggtatcctaaagagattggcgctactagaggagattttatgcgcaatgattctcccgttcaaggaattacctatgacaagcataaaaaacagatttatttggcctttaatgattatttgtttaaattgaaacgctcaggtaaagtgctggctagaggtcactttcatacagggcgtgaatttgaggggattagcataaatggtcgtcatttatacgcagagctggcgcaaaggccagaattgttgaggcagaggataagataataggtgtaaaaatatgttatacccagataaattctatttaacacaagatttaaatagaagatttgccagaactaaccttgctcgactaatatttagtgatttgcattttgagaaaacaaatatttctttaattcaaacacaattagttgctgatgggttaaatatagagagggcttccgagaaagataaggaaagaattattcgattaaaacgagcatggcaatatattattaatgaaaataaggtgttatctttagatattgaactaaagatacatttattactgacaggctatggcttccgagataatctaaactacaaacaagaagaaaaatttttcgatgagttaatgaacaacgatacctcgactacagataaggcaatgacattgatgtatcataatatgcgtaatcaattattctggggcggaaataagcgtactgccacactagctgcaaataaattaatgattgaccatggagcaggtttaattaatgccccacttgataagtgggatagatggaacaagctgattagtcaatattatttaaccggcaaaatgaatatgttaaaagattggacctatgaaaatggcattcaaggagtagtgctgaataataattcagatttacctaaacctgatattaatccagaagattatgattaattacttaagcagaccgaataggcctgctttttttgtgtgcaaaagctctttttgaaaatatcatgataaaagttcataatagaaattgtttgtttatgttaaaggagttgttttattttttatgaagaataatgatcacgttaagataagtcctagtagtcttgtcttgatgattttttcttctatttttggatttagtaattcactgacagctttttatcaaatgggttattcaagtatcatttggtatattgtcacagctattttattcttcctgccatcagccttaattttcgctgaatatggtgcttcctttaaaggaattaaaggtggaatcttttcatggcttgaaggatctactaatgaaaaagtatcatttatcggaacttttatttggctggcagcttgggtaatttggttagtttcatcaacccaatttttcttagtttcagtttcaacggcaatttttggtcatgatactaccccaagctggcatttagggtcgctgacttcaactcagttattaggtgtgttggaagttattttcttagtaattgttacattttgtgccgcaaagggaattgataaaataaaggcgattaataatattggtgggatctttactttaggaattgccattggttttacagcagtttcactttttgtctttattttgaatcatgggcaattagctgaaccagtgaccgcacaaaatatggttcattcacctaatccagcatttcagtcaccgattgcggttatttcatttattgtctatgctttatttgcctatggtggtctggaaacaacctcaggagtaattgattcagttgataaaccggaaaagaattatcctaaggctctgattacggccatggtcttaatgacagcactttatgttgtaaacatctttatgtgtggggtggctgttaattggaacaaatcgttaggtggtaaaggtgttgacttagctaatgtcgaatatgttttgattaataatttaggtattgtcactggtcatagcctaggtctatcacattctacttcactggcaattggaactgtcttttctcgtttggccggaattgcggatgtgttatcaggaattgccgctgcctttttgatggtttattcaccgattaaatcatttattgaggggtgtgatccgcgactattgcctaagaaaatggttaagttaaataagcacaatatgcctgaattctcgatgtgggtacaagcaattgtggttagcgttattatcttatttatttcatttggtggtaatggagcacaacaattctatacaattttaatggatatgatgaatgtttcttcatcagcaccatatttatttttaattgctgcttacccattttttaaagctaaaaaagacttagatcggccatttgtttttattgaaggtaagaaaaaagtttgggcaacgacaattgttgtttggttagtggttgcggtcggaattatctttacttgtatagaaccactctttaccggagactggcaaacttcattctggacggctattggtccagtggcctttggtgttattgcttggatttattacgcatataatgaacgaaaagaaaaagcaatggcttaatacgcaaaataagacgaaggattttgtccttcgtcttatttcttttctctattttttactttaagccagctactctgacaacatcacgttcaatcattaattcctcattagttggaataaccataccaacaatagttgagtcgggcttggtaataatggtggcattttctttattagcggctgaatcaggcttaaggcctaaaagttcgagtgaatccatgacatgttcacggacaccaaagtcgtgttcaccgacaccagctgtaaaggcgataccatctaggccacgcatttcaagggtataagcaccaacatagcgaatgattcgattaatgaaaatgtttctagctaagtcagcacgcttcttcttttccccttcgagcttagtcatgtcaccacgtaaatcacgcatatctggtgaaatgcctgaaattcctaacaaaccagattcgttgtttagaaccttaagcatttgatcagcatcaagattttcctttttcatgacaaaagcaagtaaagaaggatcaacatcacctgaacgggaactcatcgtaatacccgccattggtgaaaagcccattgaagtatcgaatgatttaccatctttcacagcggtaactgaagcaccagatcctaagtgacaaacgattaatttcaagtcctttaagtcgcgtttcataatttcagcggctttttgactaacatatctaaccgaagtgccatgtgcgccatattttcttgcaccgtatttttcatagtatttatatggaagtgagtacaagtagtgcactggatccaaggtttggtggaatgaagtatcaaagacagcgacttcagggacgccaggcaatactttcatgaaggcattaatgacatcggcttcagcggtattatgaagcggcgcatattgtttcaaatcataaatcttttgtagtgacttttcatcaattaaggtggagtccttaaattcttcaccacccgcaacaattcgatgtccgattccgatgatttctttaggatcgtcaattaaatcatacttttttaaattttcaagcaagattgtaacggcagtttcggaatcaggaatgtcaactttttcttggtgtttttcacctttaaccttgattgtaaaggtggagccgttaagcccaactcgatcagccatcccttcgctgataactttttcatcaggaaaggtgaaaagcttaaatttaaaagaagagctacccgaattaatcgctaaaatttttttcataaattatgcctctttttcttaatttttgcagtgcaacctatccagtaagggcatgcaataaagaaaatgccactaatctgctttaagtaagttcttgcagtaatagtgtcaacgtctttattatacaacttttgctgtaagctcttacagatatgaaactgtcaaatcttttgtgtaaatagatctttctcgtaaattgattttttaattatttatttaatcaaagtaggattctaaggtgtcctgaacctgaccaaagcctttatgaattcgattgaaataacggtcattgtagctcattgcctgaatgccaataaaagcatcaagcgactgttcagttggaaactctgccttaggcttagctttgcgcttgatcacattgttaaatgattcaatcatgttagtcgaataaattgaagctctgatctgcttgggatagttataaaagaccagcagatctggttctatgtctttcaagcttctgataacatggctgtaaaccttgccccatttggtatagaagtcatgcaggacagctgtggcttcttctttgtttgtctgttgatgcacctgtttgaattcgttcatgatcttttcacgatcgtcgacgcgtactttagcgcagatattgcgcatgacatgaaccaaacagcgttgaaaatgagctttaggataagtcctggccaaggctgttttcatgccaacaacaccatcagaaagaaaaagctcaacttgctttaagcctcgggatttcatgttttgaagcatatctgtccagacttcaatgttctcgctaggcgcaatgcagtagtcaatgacctccttgtgcccattaggcttgatgccaatggcaatatagactgcttcacgctcaaatgtttctcggcgcaaaggaaggtatgtcgcatccaaatagacgcagaaaaacttgtcgcttagcttgcgtttgtggtaagcctcaacctttggaatcatctgcttggaaatatttgatacctgagctggactgtaatggctgccatacatcttttcaattagatcggctatttccctggtggtcacgcccttggagtaaagcttgataatcatgctttccaagatatccgagtgctgcttgtagccaggcagcgtgtgctgatgaaattgaccgttgcgatcccggggcacttgcacttcaattgggccaaattgcgtatcaactttgcggaaataagcaccatttctagagttgccagtattccagccatttctggcatagggatcatagcccagaaaggcagtcaattcagcttctaacaagttattaacagcctgttgtagctctttgcgcaataaatcatttattttgtctggattgaatagagcttgagcaaaatctttggtaaaatcattcatgaaggagttcttctttctgtatgtgtttttttgttcaaaccaatcatacgagaaaggaactcctttttctaatgtttaaagaaataaatttaaggaatcattcatccttacacaaactattttacagtctcacagatatttttttattactaaaatttatatataaatttgattgatcatatataaatttagaatatcaatttgcaacaaaaccgcttacaaactataatgaaattaacatacaatatatattgagaggagaaaaacgaatgacccactactacgaaggctttccacaaagtgaccgcgatgaaaaaatcaagatggtgaatgtggatgaacttgaagaacgtgttaagaaggtaatgccagaaggtgcatattattatattgcttcgggtgcagaaaatgaatggacctggcgtaacaatactgctgcttttaatcattttcaaattgtacctcgtgctttgactgagatggctgatccgcaaactgatactgattttatggggatgcacttaaagacgccaattatgatcgctccaattgcttgtcatggaattgcacataaagatgcggaagtcgcaacgcaaaagggtgctgctatggctggtgcgctctttagttctagtacttatgctaataagagtgtagaagaaattgcagctgcagctccagaagcaccaaggtttttccaactttatttgagtaaagactggaattttaatcagatggtttttgatgcaattaaaaaagctggttatcaaggcattttcttaaccgttgatgctttggtatcaggttatcgtgaagcaaacttgcggactaactttacttatcctgtaccattggacttctttaagcgttaccttggtgcaaaaggtaaaggtcaaagcgtagctcaaatgtacgcttcttctgcgcaaaagattggtcctgaagatgttaaaagaattaagaaagaatcaggtttgccagtctttgttaaaggtgttatgtgtgctgaagatgcctataaagcaattggagccggtgctgatggaatttacgtaactaatcatggtggtcgtgaagttgatggtgctcctgctaccattgatgttttgccagaaattgcgcaagcagtaaatcatcgggtgccaattatctttgattcaggtgtccgtcgtggctctcatatctttaaagctttggctttgggtgctgacattgttggaatcggttgcccatatctttatggtttagccttaggtggtgcgcatggagttgcttcagttattgaacaattaaatgatgaattaaagattgatatgcaattaacgggatgcaagacaattgatgatgttaagcatgctaaattgacgcacattgcttatactgctgataatttgccatctaatactgatccaagcagacgcaaggaatatccggtaactgacgaaaatcaagttaagcaaactgatgcggtatctggtgcttctaagttagaaggaaagccagctccggaaccagagactgataccacaactggtgcttcagtaagataaagcaaaaatataattaatattttcaatatgattgtcattgaataaatgatagtcatatttttttactatcaagaactcagcggctacaatcaaggtgaaagcgattcgatttttggagaggaaaattaaattattgaagagaataatgttttgactgatactgaagagcttaaaatcttgagtgatcttgttgcaataaaatccgttaatgataatgaaattttagtagcaaaatatttacaaaaactattaggagaacatggaattagttcacgtttgttggaatattccacaactcgcgcagatttatttgctgaaatcggaacaggccatcccattttagcaatttgtggtcacatggatgttgtttcaccaggtgaattagatcaatggcatactgatccctttaaattaaccaataaggatggtaaattgtacggccgcggagcgactgatatgaagtctggtttagctgccttggttattgccatgattaatattcatgaacaccatttaattaagcatggtagtatcaggctgctagctacttttggttggtgaaccttctggctacagtattgccattgctcataagggttcgatggatactaagttaacttcccaaggcaaggaagctcatagctcaatgcctgaaaagggttataatgcgatcgatccattaatggatttattagttaaggccaacaaggcttttagagaaacagataaaaacaatccagacttaggtaagttgacgttcaatactactgtttttactggcggggaacaggtcaacatgattcccggagaggctaccgcgcaaattaatgtgcggactattcctgagttcaataatagtttggttgaaaagaaattaactgaattagttaaggcagaaaatgcgcaaggagctaaaatcaaaatgtacatctatatgtcggaaccttcaattaaaactgacggtaagtctgaatttgtaaaattagcccaaaaaattggagcaaaatatgcggaaaagccgattccaacagttgctattaaaccagtaactgatgcttcgaatttgattgccgacaaaggacctagctatccgtttgccatgtttggtcccggtaatgacacgccgcaccaagttaacgaatatgttgatgaaaagatgtatttgaactttgtgaagatctatactgaattgtttgtggcctatttgaataaataatttggaaagtaataaagagcctaggcaaaattttagcctagacttttttattgtattttgaagtattctttagccgcatcactcatccgttcaggggtccaaacaggataccagacaaattctacatcaacatttttaacttcagggacttttttaacggctgttgtaatctgcttgatcaaataatcagtcaaaggacaggcaggtgtagttaatgtcatattgatgagacagatcccatcttgatcgaggtcaatttcataaatcagccccaagttgaccacatcgacgtttaattctgggtcaataacttgagctaaatgttcaataatatcgtttttaattgttttgctatcacgcattgtgttacctacgcatctttaccaaaaatttttgctttaattgcttgacctgttggtgtaccagctaaaccgccgattccagtttcacgcagagatgccggcatttgatgaccaactttcttcattgcttcaatacattcatcagctgggattacacttgtacatcccgctagcgccatatcagctgcgataagtgcattaccagcgccaataccatttcttttgacgcagggaacttcaaccaaaccggcaatcggatcacagactaacccaagcaagttagacatcgcaatcgataaagcttgggcactttgttcagcactgccaccagctacttcaactgccgcggcagcacccatggctgaggcactaccgacttctgcttgacagccgccagttgcccccgcaatttcggcattattggcaatcaccatgccaaaaccgccagcagtaaaaagaaagcgaatcatttgctcttcgctgagctgtaatcttttttctaataaaaatagaacgccaggtaaagtgccggaagaaccagccgtcggggtagcgcagacaacgcccatcgctgcattgacttcgttagtggctatggcattttcaactgctgccatcattgtatcgcctgaaagtgtgtgtcctttctcgcgatattttttcagcttaattgcttcgccaccagttaagccagtttttgaaaagacaccgtttccagattcacctcttttaacggcagctcgcatagtttgcaagttatatttcatgcgctgccagactttttctcgtggcaagcctgatagttgacattcttgttcaataattaattcagaaataggtttgtgcgttttttctgctgcagcaacaatttccttaatatggttatacataatattgccctatgttataaacaaataatattctcaaattttttatttagttcttgcaataaatcaggatgaagataattttctacatcatattcataaatattatagtttttagtatgaaaaattcgtttgcgactaaagggtgctttttcgtgtaagagcgcggtaagctcttgttcaatgcgaatatttttgtgtggatcaactaaaataataataggtaatgcaccagcaggttgaatctcggtattatgtaagacaattttgcgaatttcaattgcaccaccaccgatagagcatccagccaattccactttctttttatcattagacatatttaaaatagcagtattagggtgaccaattgggctaggaccatcttcttcaacaaaacgtaaatctacgccgcgctggcgtgcaatctcaggtgcctttggtacgcgtagatcgtctgagtcaaagcctaaaatacctgccgcaatagcatagtctgttccatgaccacggtgagtttgggcgaaagagtcgtaataatgaacggtaactttactcggggtaccgccaaaaagtttgtaaccagcgcgtccaatagcgacggctccggccgtatgtgaacttgatggtcccaccattacggggccaataatgtcaaaaacacttttataccgattagtcattttaatccctgctttgtaagttattctgtttttaattataacgaataataaagaagattaagaaagttttttggagactgtaaaatagtttgtgtaaggatgaatgattccttaaatttatttctttaaacattagaaaaaggagttcctttctcgtatgattggtttgaacaaaaaaacacatacagaaagaagaactccttcatgaatgattttaccaaagattttgctcaagctctattcaatccagacaaaataaatgatttattgcgcaaagagctacaacaggctgttaataacttgttagaagctgaattgactgcctttctgggctatgatccctatgccagaaatggctggaatactggcaactctagaaatggtgcttatttccgcaaagttgatacgcaatttggcccaattgaagtgcaagtgcctcgggatcgcaacggtcaatttcatcagcacacgctgcctggctacaagcagcactcggatatcttggaaagcatgattatcaagctttactccaagggcgtgaccaccagggaaatagccgatctaattgaaaagatgtatggcagccattacagtccagctcaggtatcaaatatttccaagcagatgattccaaaggttgaggcttaccacaaacgcaagctaagcgacaagtttttctgcgtctatttggatgcgacataccttcctttgcgccgagaaacatttgagcgtgaagcagtctatattgccattggcatcaagcctaatgggcacaaggaggtcattgactactgcattgcgcctagcgagaacattgaagtctggacagatatgcttcaaaacatgaaatcccgaggcttaaagcaagttgagctttttctttctgatggtgttgttggcatgaaaacagccttggccaggacttatcctaaagctcattttcaacgctgtttggttcatgtcatgcgcaatatctgcgctaaagtacgcgtcgacgatcgtgaaaagatcatgaacgaattcaaacaggtgcatcaacagacaaacaaagaagaagccacagctgtcctgcatgacttctataccaaatggggcaaggtttacagccatgttatcagaagcttgaaagacatagaaccagatctgctggtcttttataactatcccaagcagatcagagcttcaatttattcgactaacatgattgaatcatttaacaatgtgatcaagcgcaaagctaagcctaaggcagagtttccaactgaacagtcgcttgatgcttttattggcattcaggcaatgagctacaatgaccgttatttcaatcgaattcataaaggctttggtcaggttcaggacaccttagaatcctactttgattaaataaataattaaaaaatcaatttacgagaaagatctatttacacaaaagatttgacagtttcgttttttgcaattttaaccgaagttttgtcataataatatgaaaagtgaaagaggttggttaaatgactaaagaaaaagcagaattaaaacaaaatttggagcatctagctgagcaaaagggcagccagcaggcagtttcttatcaagacttgtttacaccacaattgatgcaaaagtatactagttttgctactattgacttttttgtcagagaattgggcgtgaaagactttacgcaaattgagcagatggcgatagatcaagtcgatgaatttgttaaaaaagagaccaagtttgctagctgggaagaaatgcaacaaaaggcggttagcgagtacatgatgaagttattttagcaacaaaaagcgagttagtattaactttaaaactaactcgctcttttatttactatgttaggtgaatgacttgagcacctaattcatcaataaagcgctgatcatgttcaattactagaatagtaggatgatattttttaattaattgaataatttgttcttggttaaagacatctaaatagttcaaaggctcatcccaaagatacaaatttgctggttcaagtaaggacttggctaagtagatctttttttgttggcctgaagacatttgattaattgaattagtgaatatatcacgttcagtacctaatttgtgtaagatattgagaaaatcggcatagttaaggtggtgcttttgggcaaaatcttttaatgataggttattagattgttcaatctgtgataaataggagattgaaatcttatcagctgaatgcaatttgccagtaattgttccagcaaaagtattagtaattgccttaaacaaactagattttcctataccgtttttaccagtaatcacaaattggtgaccacgcattaaatcaaaggtagtaggttggaaaaggggaagcttgtcataagcaaggctaactcctttagcagtaattagatgtttatgatggtcggggacaaaattcatagctaggtcattgtctgcttcaatattttttaaaagaccttttctttcttcgatatttttatctaatcttgcttctacatttttggcaagtttcatttttttggcggctttgtgtcccatgaatcctttatcataaactgtacttctatgtcgaatatcgcctttcatcttggctcccgcatttttgttgctttcggaacgctgggcaaaagtttgcatcttttgttgactggcatggagatttttaatttgcttttctaactttgcattataagcgatattagattcatcctctaattccttttgtttttcataacgagtatagtttccttgttccagcctaattttttgcatttcaattgctagggtgtgatcgacaactttatctacaaaatttcggtcatggctgattacaattaatccttgttttttattatgcagatattgtgctacttgatttcgtgtatcttcatcgaggtgattcgttggttcatctagtagggcaaaagaatgttgattaataaaacaaagcgccagtaaaatttttgtttgttcaccgccactaagtgttgaaaagggctgccaaatgatatcttctttagcatgaagcagatttaattctcgttttaactcccattcctcaaaattaaactgttcttgtaaagcataaatagtaaggttatcgggatcattaattacctgaggatagtaattgaattctaaatcactttgaatagttccttgatattcgacctgttttagcagcattttcataaaagtggttttgccgcgaccattacgaccgattaagccaagtttccaattagaatcgagatttaggtttaaattatcaaaaattttatcctgaccgtcataggcaaatgaaacgttttttagtgaaattgtagacataaaaaagcaccgtcctctcaaactgtgcttatgatctgagaaaatggtgcctgatagattagtccaagttggctaatctataattattcttaatttaaattaaagaaaatcacgcagactaatttctgatcacaagcaaaaagtacatccttaaactagtagaatgcattattttttacttaacgaaaatcagaaattaaaaacgcatcggcgtgattcctcctattacttgaattgattaatctggcaatactttaccatcaaatataattatttgtcaatatttttatgataattcatttgcaagctgtgattaataaggagactgtaaaatagtttgtgtaaggatggatgattccttaaatttatttctttaaacattagaaaaaggagttcctttctcgtatgattggtttgaacaaaaaaacacatacagaaagaagaactccttcatgaatgattttaccaaagattttgctcaagctctattcaatccagacaaaataaatgatttattgcgcaaagaactacaacaggctgttaataacttgctagaagctgaattgactgcctttctgggctatgatccctatgccagaaatggctggaatactggcaactctagaaatggtgcttatttccgcaaagttgatacgcaatttggcccaattgaagtgcaagtgcctcgggatcgcaacggtcaatttcatcagcacacgctgcctgactacaagcagcactcggatatcttggaaagcatgattatcaagctttactccaagggcgtgaccaccagggaaatagccgatctaattgaaaagatgtatggcagccattacagtccagctcaggtatcaaatatttccaagcagatgattccaaaggttgaggcttaccacaaacgcaagctaagcgacaagtttttctgcgtctatttggatgcgacataccttcctttgcgccgagaaacgtttgagcgtgaagcagtctatattgccattggcattaaacctaatggacataaggaagtcattgactactgcattgctcctagtgagaacattgaagtctggacagagatgcttcaaaacatgaagtccagaggcttgaagcaagttgaactctttctttctgatggtgttgttggcatgaaaacagccttggccaggacttatcctaaagctcattttcaacgctgtttggttcatgtcatgcgcaatatctgcgctaaagtacgcgtcgacgatcgtgaaaagatcatgaacgaattcaaacaggtgcatcaacagacaaacaaagaagaagccacagctgtcctgcatgacttctataccaaatggggcaaggtttacagccatgttatcagaagcttgaaagacatagaaccagatctgctggtcttttataactatcccaagcagatcagagcttcaatttattcgactaacatgattgaatcatttaacaatgtgatcaagcgcaaagctaagcctaaggcagagtttccaactgaacagtcgcttgatgcttttattggtattcaggcaatgagctacaatgaccgttatttcaatcgaattcataaaggctttggtcaggttcaggacaccttagaatcctactttgattaaataaataattaaaaaatcaatctacgagaaaaatctatttacacaaaaaatttgacagtttcagattaaatttcttcactactcaattcaaacatattaataattgatttaaacatagataaaagttgtttaactgaaacttgaaagctaagattaacgctccttccccgcgcctcttggctttttcttatcaaaaataaaaacgcaggatctctctgcgttatactttaagtgtcgacctaaaaagtaaaggagatcctgcgcaatgaacagtatagaacaaatcgacacagaaaatgatactaaatccttaatttcttcatttattaatctaattggtctagctaagttaactaaacaagtcaattttaagcgtaaatccaccgtttcattaaccatgattatctcttggctgatgtcagtacattttgctcggctttctttattcagagctaaggatgacaaacgtttttccgttagaactgctcgcaatgtacttaacgatggaagaatcaactggcaaaaactattatgcttgattgcagcccggctcattggctgcttaaaaccatttatcgataaaagacgccgacttgcttttatcgttgacgatacgctgatggctcggtctttttctaaaaagaccgaattgctagctaaagtctatgaccatgacaagcatgagtatttgaacggatatcgtggtttaactttaggctggagcgatggcaataccttcttgccggttaactttgccttgatgtcaaccaaaaccaagaaaaatatgattggagctgctcccattactgctgatgaacgttcaatttctggtaaaaggagaaatcaagctcagagaaagatgaatgatgtaactgtagagttgattagacaagccttacgattaggagtagaagctaaatacgtcttattcgattcttggttttcttctccaagaatgttttggattttaaagaagatcggtttagatggacttggcatgatcaagaagagttcaaagatttattacatttatcgccatcgccgctatagcgttaaagacttgtatgatcgtttggctgcttcaaacatccgtaaaaagaaacattatctttattcaagcatagttgaggctcaatatcatggacatagctttttattaaagctcgtctttgtctccaaccgtggaaacaagaacaagtatttggttttagctactactcagacaaagcttagccctgaagaaatcatccaactttatggtcgtagatggcaaattgaaacatattttaagacgtctaagcaatatcttgctttagataaatctcaagttcaaagctatgatggccaatgtggctatatcgcagttacagcaataacttatgatctattgacctggcaggaaagacaaaatacagatgataagacaatcggagatttattctatctaatgaacgaatccttacctgatattagattcgtagatgcattggtctacttaatttcagaattaaaagagcttaaacagaatagttttgaaaagatagatgaagtaatcaatgactttattaaccaactgccacgattcatacaaattgcactgaaacagatcatataaaaactaattacgtctaagaaagctcaatagtgacaggacttgagcttgattttggtgctttcaattttcagttgtttaactattaaaaatgaattttgtgaatataatgttatcgataacagaaatcatttttatattgcaaatgaaagcgcatacgtttattgttgaatttgaaaaaacatgattttgtggaggaatttatttatgaataaaaagagtggtcataatatcaaatttaaatcaatttttgtatgtacttcagctattatgagtctttggttaggggcaaacttaactacgactcaagttcatgctgcagaagacaatgcagctcctaaaagttcagaagttgtaggccaaacgaattctagcaaagataatgcagctactgctactgtacaaaatcaaagtaacgcaaaagcaaagcagcgtcaacaaggtgtagctcctcaaaacgttcctacagttttggcagccaaaactaaagatgagggaacaaataactctccagcacgtgaggaagttaaagatcagactaaagtagttattcactacaatggtgatggtgaaaaatgggttccttatatttggggtaagaaacctaatggtaacggcaatgaatacaaatgggccggcaaagatgataatgggtattactcggttattgatttagataaaaactatgaccaagtaggagttttaattaaaaccaaaggcagttgggctggtaaagacggtacaggtgctgatcgtagcttaaatgttagcgataatggcaaagcggaagtcttctataaagcaggtagtgatgatgcccaaaaggtaacaccagagtaccattccgcaaatataaatttgcattattacggtgatgaccaagttaataaggttaatgtttggacagataaggatcaagataataaacaacttattagcttaaccaaacaaggcaatagtcaagatggctcaatcaaattagacaatactgattttagtaaactttttgttgcgccagttggttctgatgaaataacaagagaattcactccgttaccgggtaataaggcgacagatatttatttagttaaaaatgatacagaagcttattatagcaagagttttgccttagctgatcaaagtctatcttctgcatatatgacttcaccagatagtttgactgttgaagcaggtaaggctactactgtcgataaaattaaaggaaaacttagtctgcgaaataatagtattgatcatattgaagcagtcgatgctaatgctgatggtaaagcaaagaaatttattattcataccaaaacagatattgatattttaaaggataaccaagttggactagggatgaactttaaaaatgttgatatcggtccttatgttcgttccaaagcttttgacgataaatatgcctatgatggtgacgatctaggctgcacctatgatagtaaaaagacgcaaattaaactctgggctccaactgctaaagatgttgaattgaatttatatgatagtgttgataatagtgccaagcctacgaatgttattgctttgacaagaggcgatagaggtgtttggactggtattattaagggcgataaaaaaggctgggcttatgattttaagttaacttttggtaatggcaaaataacacagactgatgatccatattctaaagccgttactgtcaatggcgttagaagtgtaattgaagactacaataatatcaaaccgacagattttaaccgaatgccttcattctctaagccaactgatgcaatcgtttatgaaatttcaattcgtgactttagtagtgatcctaactcaggaattaaagataaaggtaagttcttagggatgattgaatcaggtaagacaccaactggacaagttactggtttagactatctcaaggcattaggcatcactcatgttcaaattatgccttcatatgatttcgctagcattgatgaaactaagagtttaaagaatcaatacaactggggttacgatccaaagaattatgatgtgcctgaaggatcatattcttctgatccaactaatccaactgctagaattatcgaaatgaaagaaatgattaatggcctgcataaagctggtattagggtcattatggacgtggtatacaaccatgtttataatcctcaagagcaagcttttgaattaacagtgccaggatattatttccgttacgatgctgataataataccacaagtgatagtggctgcggtaatgacattggtagtcaacgtaaaatggttcgcaagtacattgttgactcagtagtttactgggctaagaactacaatctagatggcttccgttttgatatcatgtccttactagatcgagagactatgaatgatgttagagctgctctagataagattgatcctggtattattacttatggtgaaggctgggaagttggtaaccagaaatatactagagaagaaggaacgacccaatacactgcggataaagttcctaatgttggtttctttagtgatgatatgagaaactcggttaaaggtaataatgatggctccgaaccaggattagtaattggtaacggtaatgaaaaaaactttgataagcatgctgtcttgtttaccgatagttttttaagaggtaaatggttacataatgattcttgggagccacataactatgcaactccaagccaaatggttaattatgccgcttgtcatgatggtaagacgttgtatgattacatcaaggctgcaatgccaaatgaatcagatgagaatattgccaggagagtaagattggctaactcaatgatcatgctttcacagggtatttctttcttccactcaggtcaagaagcattaagaactaaaggtggcaattcaaattcatataattcaccagtaaatattaatgaaattaattgggaaagagttggtgctaataaagcatcagtccaatatttccaaaaattggctaaattacgtaaacagctgccaattttgcatttgaatgatttcaataagatttatgacgagaatgttactaaaattattagttatggtagagaaaccaaagataaaaacatcaagggtgtatttgagtacgaatataatgttaatggcaagaagttattaattgtctttaatgtcaacaatgataaagttgctctaaataatgttgatttatcacatggtaagaaattgttagatagtgatggcaatgtgaaattaagtgataaaactatgctggcaccattaagtacacttgtagttgatgaagatggaacaatggttttaccagacgtgccaaaaccagatcagcctgtaagtccaaccactccaggtgataagccaggtaaaccaactacaccagaaaatccaaggattccggatcaaaagccagccaatccaattgttccgcaagaaacaattattacacctgaagctccaagtgaaaatagtattatagacaatactaaaaatataattaatggatcagaagagactactacagtttctactcaggataatacaaccactgaaatattattgacccataatgcttatgtgtatgacagtgaagcaaatcctatttatcaaaatgataacaagcttgtcttgaaagctggagatacaattaagcctttggataatggtaaaaagtatagtattaaaggtaagttgttctataaagtagctaaaaatcaatttgtcaaagttgctaatactgttagttactataagttagctcataactcattcgtttataataagcatggtaaagcagttaagaagaatggaaagcgcattttacttaagaagaataagcatatttcacttcattctgataaggtcgttaagattaaagggaagaaattctatcaattaaaagatggtagctttattaaggctagaaatgttaaaagaattggttagatttagatagttaattaaaaatattaaaaaacaagattgtttccaaaatgggcaatcctgtttttttaatcctgattaatcaagctaacgggcaaagtataaacactctccaatgataccgctggatcattaatttcgcaatctctttagtccgttgccgcgcactaattaaatgtgggaataggttctgaatcaattgtgtgccgtcaaatcctgtaattaacgattttttatttaaataatcgttgcattctttagccaataaagccgtaatgtcatccgtacaacaaatcgcatcgtaatcgttatctttcaaaaattgaaggatagcgattacgatgcgataattgattcacgggcgctaattgagcgtaaatcaaatttaacgtcaaaggtattaaacacacacatcatccctttgatacgatcactgattggataatagtcttctttggaaccagcaataatgattactttcttctttttttgctttaaaaccgactttgcaatttgcatctccgcatcatagttattcgactgcacagtagggatctgcggactaattacccggtcaaaactaaccaccggtagattaagcttgccactcttctttgaaatctgaattggcgagctggtaagtaagcctacgatctttttttgcttatatttatccaaataatactgcatatcttgctcttgataatgatctaaatgcaaaatgcaatcataacctttatcctgcaaaatagtagccaagtattcatacagttctgaatagaaaggattattgatttgcgaaaaattgatttcaattaagtttaattctgttttagcggaaattgcattcttgggtttataacccagttttttgatagcttcctttatttttaaagccgaatcaatgccaacgtaaccattctgattaagatatcgcgaaacggtggcaatagaaacgccggcttttttagctatttctttaatagttactgccatgttttacacctttatatgtaaatcctacacactttctatcagtaagtatagcatattctaaaacctgaattgtcaaattaagtgcaacagttaggctatgaggaaatatattgcttgaagagttcttctgctgtgtgatattgaaggattcgacgatgtttgcggttaatggcatcagttgcctgttgaacataagcagctgacttatctttcatgcttttgcctttagggaagaattgacgcagaagtccattgcagttctcattggtgcctctttcccatggagaatatgggtgggcgaagtagatctggcagcctttgatcttggtcatatccgcaaactcagagccattgtcaaacgtgatcgatttaaaccaggcaggatgtctgtcaatctcattttgaagcagccttgggcatgtgcttgcccgatagtcaggaatcttgataactacttcaaagcgtgtggttctttcggtcaaagtcattaaagcaggctgattcttgcgtctgacgcctttaaccagatctccttcccagtgcagcggcgtttttctgtcttcaatctctttaggacgctgttcaatggaattgccaagatgcttcttgtgcaaagcatgaccgctatggccgtgatgacgcttgttcctgcgtcttttgagcttcataggcagatcaatattgcttatgtccagcaagccctgatcaatatagcgatagacggttggtgtgctgggacaagggtagcctggcatttgaattcaccaacgaattcatcgatgctggtggcatcaaatttagctttaaagcgtctggagagcattctcaaaaagacagcataatgcttcaatggattgcgctgatagcagtttttgcgacgcttctcataatgaagctgtgcagtatcagcgtaatagtgctcatacaataaatagctgctgtctctttgcaggacgcttccgcgtttgatttcgcgactgattgtcgacttatggcagccgacttcttgagcgataacagtacgggaagttatgccggaatccagcattgcttgaatttgtccacgttgtacgctggttaattgatgatagtgcttagaaatgctagaatttgaattggtcatgaagatcttcctttcttgatttttcgtcacttcaagtttaggtcttcatggcctttttgtttaacacttggtgttgcacttcaattttaaatccgggtccattattaattcctttcatagaaaactaaattccttttctaaaggggtcaagagctattatatacagttttctcagcagttacattcgcaaaaaagaaaaatgctaaatttatttaaaatatttagattttttatgcaataaggacaaatagctaggagaaagaacaaagaatatctccccatctattgatgtaacgctaaaacataatttactttctttgtaattttgtgtatactaaatatacacaaaaaagaaagaggcgtacaactatgactgtaaaattaagaaaagttggaaattcaaaaactttaacagttcctaaagatataataattactagtaaagagtatactgtgaaaaatgaggggatgaatatagtttttacacccgtcgtgaagaaaaagaaaaatatttttgcaaccaaagaatggcaaaattatgattatcaaaaagacatagaaaatgacgtggaactacaatcagtaaaaccagtgggacgtgaggtagttgattaatgatttatccgaaaaagggagatattgttaaagcagatgcagaacctcattccggacatgaaatgggtggccataatccgcataaaggtaatattagaagacattatgtggtaatgagtaccagtgcctataataaatcaacacatatgtttatagggatgccgattactacttcagataaatatcaaggcaacccacattacgagccaatattaattccaggcagtaatggcactggagtaaaaggttatgttgttttatggcaacttcagaattttgactttgaatctagaaatggagaaattgttaatcacgtaaatattcagctattagacaaacttcaaggtttcgtgaatgatatggtgggactagaataggtaaaacaattatgccaattttaaggctagttcgattatgctgagaggacgattctgaggtcaagttcgactgcagaggttaaaattaatcatttaatgcaatagaatgctaattcttatttttatgggaaattagcattcttttttgtactttctaactatgtagaataatgagattttattctacatagtacatctaatcatgcattattctgctatgccaattttggggtgtgttgattatgtagtataattagctatagactaattattcaacatagagtgacgaaatacttgtatatcaaggactaatataaaaattgacagaaggagacgtaaattgaagcataaagatactcgtccaattactgatccaataattttaaagaagtttttgaaacatttacgtgaagatactagtatgggagaaagaaactatgctatatttcaaaccggtaaagcaaccttactacgggtaagtgatgttctagctttgaaaaagaatgatgtctttcaagccaatggcagagttaagaaaaatgcttatatcgttgacaaaaagacaaaaaagcctaaccgattatatttaactccagttagggatgttttagaggattactatgattggctgcaagaatatgaaaagaagcatccctacacgaagctgttttcttctgaatggctatttccaagttctaggagattaggtgaggatgttccaataagagaaaatagtttttatagaatttgtcatcagaccgagcttaaaattggggttaattggattggctcacactcaatgagaaaaacaggagcttttatggtttatcagcagactaatcataatactgctttagttatgaaaatgctaaatcactccagtgaagcaatgactttaagatagagaccgtaaaatattttgtgtaaggatgaatatttccttaattttattttcctgaatattagaaaaaggaatccttttcccgtatgattgatttgaacgaaaaacatactagaaaagagattccttcatgaatgattttaccaaagatatggctaatgctctattcaatcaggataaaattaatgatttatttagacaaaagctccaacaggctgtcaatgacctgcttgaatccgaattgactgcctttttaggctacaatccttatgagcgcgatggctggaataccggaaattctagaaatggtgcttattaccgcaaggttgatacgcaattcggacaaatagaaatcaaagttcctagagacagaaacggtgagtttcatcaacacactatgccagattataaaaggcatactgatgttttagagcaaactgttatcaagctctattccaagggcgtcacaacccgagaaatcgctgatttgattgagaaaatgtatggcggctattattctccagctatggtttccaatatttctaaagaaatgattcccaaagttgaggcatatcatcagcgacatctgtcagataagttcttctgcgtttatctcgatgccacctatattcctcttaagcgggtcacttatgagcgcgaagcagtttatatcgccatcggtatcaaacctaatggtcataaagaagtgattgactactgtattgcgcctactgaaaatattgagatttggagcgaaatgctcaaaggcttcaagaggcgcggccttgaacaggtagagctcttcttgtctgacggagtagttggcatgaaagaggctatctgccagtcctatcctaaagcgcattttcaacgctgcttggtacacgtcatgcgtaatatcagtgccaaaatgcgggttgacgatcgaaaaaagcactggatgaattcaagcagattcatactcagtcaaacaaagaaatggctgtacaggtgctgcatgaattctatcaaaactgggaaaaagcctacaaaaacgtagttagagatcttagacaggttgagcctgatctgttaaccttttacaactatccgccagctattagagcttcaatttactcaactaacatgattgaatcctttaacaacaggcttaagcggaaaaccaagcctaaaacagaatttccaactgagcagtcgcttgacacctttattggagttcaggcaatggattacaatgaccgttactttaacaggattcataaaggatttgggcaagttcgagacaccctagaatcctattttgattaaaagataaataaaaaagtcaatcaacgagagagattatttacacaaacttcttgacagtctctaatgtcttaactgttaacttaggaaaatgtcctaattgtagtaagtatgacataatttcctttattggaggttatagttagagtgaataggattgatttaactatgaaatatgatgaacagtacaaagtcattaaggatcttgtagatcacaacggcaataagaaaagagcagccttgaagctaggaatatccgttagacaaataaacaggagaatcaagcagtatcaagctaaaggaaaagcggccttcgttcatgggaacaaagaccgcaaacctgttaattgtctcaccacagaaattaacaatcaaattgtaaccttataccgtactaaatatcaagactgcaatataaaacattttgtacagctgttagatcgctttgaggacattcatgtctcttataccaaagcttacagcctgctcaagcagcaggatattctttcccctaagccttggagaaagactaagcgtgccttagccaaaaagaaatggcataagcagcaccctaagcaaagcaaacaagaagtcagcgctgcagttgatcatcaactagctttggcagatgctcatcctcgccatgaaagatgcaagtacttcggcgaagaaattcagatggatgcttctgtcttagtctggtttggtaagcgtaaggcttacctgcaccttgcaatcgacaacgctactggcattattgttggggcttattttgactgggaagagactttgaatggctactatcacgtctttgagcaaattcttaaggaatatggcattcccctttgctttaagactgataatcggactgtattcaattatgagactgctcaaaccaaagctgcccataaagatgtgctgacacaatttggctatgcctgcaaaactcttggcgtagatctaaaaactactagtgtttctcaagccaaaggcatggttgaaagagctaaccaaaccgtccaaggtcgccttaagccagaactaagattggctggaatcatgacaatcaacgaggcaaataaatacctgcatgatgtgtttgttcctgactttaaccaaaacttcagtcagactagtcgtaaagcctggtatgtttttgaaaaggctcctgatgactgcaaaatcaattataccttggccgttctcactggcagagtgtttgatagcggctcagctatttctttcaaaaacaagctttatcaagcaacagatgaatatggcaaattagtctgcttcatgaaaggaactaaatgtctggtaattgaagccctagatggacaactgctaacgacagtagatgagcatgtatatctgcttaaagaaattcctaagaatgccaaaatatcgccagaagtagaccaagagcctaaaaagaaaaggaccaagaaaaagtggattccaccaatgtcacatccatggaagcgagaatcattcataaagcaacaaaagagagctcataaataccatcaatacgtataaaaatagcggagagcaaattctccgctaataattaaataattttgggacattttcctaaattattgacatatttttatgataattcatttgcaagcgtaagtcctcgtaaattggttttccacctaaaatgtccagaatgtagtaagcaacgaaagtaacaataatcattggcaatacttgctggacagtcccaatcatttcagtcagtagcataattgctgtgaatggtgctttttctattgcaccaaaatatgcggccatggaaatcactaggatatgagggaagtacattggcaaaataatctgcaattttatcataatattggcgcaaattattcccaataatgccccaagaactaggataggcatgaaaataccaccaggtacggaagaatcatatgaaagcattgaaaagacaaaccgaattatcaagaataagatcggtagtaaaaaaagtcccatgatccaaaggctttgacattccaattcaaattgaataaattatcaattaacacatgtgaaccaccgagtaagtgggcattaaatagaccaactggaataattaaaattaaagcctgaattgtcaaattaagtgcaacagttaggctatgaggaaatatattgcttgaagagttcttctgctgtgtgatattggaggattcggcgatatttgtggttaatggcatcagttgcctgttgaacataagcttttgacttgtctttcatgctcttgcccttagggaagaattgacgcaaaagaccattgcagttttcattggtgcccctttcccatggagaatatgggtgagcaaagtaaatctggcagcccttgatcttggtcatatccgcaaactcagagccattgtcaaacgtgattgatttaaaccaggcaggatgtctgtcaatctccttttgaagcagcctttggcatgtgcttgcccgatagtcaggaatcttgataactacttcaaagcgtgtggttctttcagtcaaagtcattaaagcaggctgattcttgcgtctgacgcctttaaccagatctccttcccagtgcagcggagcttttctgtcttcaatctctttaggacgctgttcaatggaattgccaagatgcttcttgtgcaaagcgtgaccgccatggctgtgatgacgcttgttcctgcgtcttttgagcttcataggcagatcaatattgcttatgtccagcaagccctgatcaatatagcgatagacagttggtgtgctgggacaagggtagcctggcatttgaattcaccaacgaattcatcgatgctggtggcatcaaatttagctttaaagcgtctggagagcattctcaaaaagacagcataatgcttcaatggattgcgctgatagcagtttttgcgacgcttctcataataaatctgtgcagtatcagcgtaatagtgctcatacaataaatagctgctgtctctttgcaggacgcttccgcgtttgatttcgcgactgattgtcgacttatggcagccgacttcttgagcgataacagtacgggaagttatgccggaatccagcattgcttgaatttgtccacgttgtacgctggttaattgatgatagtgcttagaaatgctagaatttgaattggtcatgaagatcttcctttcttgatttttcgtcacttcaagtttaggtcttcatggcctttttgtttaacacttagtgttgcacttcaattttaaatccgggattaaaattaaaggaatgatactgtgataggctgcagggatttttttaattttactgaaccatggctttagcgaaagtagtacatattgataaatgtatgccattattcccaaaaagataccaattaaaggtaaataatcgttaacgggtaaataaaggaatggtttgtttccaaaggctagaatagtaacgaagtcagctgaaaaagtggcggccaagacggctactactttttgaggtttaaaatcaaaagtaatttcttcgaccaagaaaagtgcaccagctattggcgcgctaaaggcggcagccaatcctgcagccacaccgcattattgtagcgttctcaaattttccttgttagatttaaatactttttctgctaatccttgaccaaccattgcgcccatttcaatacaaggaccttcacgacctagcattaatccaggacagatagctaataagcctccaataaatttccgccaaagaatggaccaccatggcatcttattttcatttaaaagaacagcctcgatttgtggtacccctgagccaattacttgttcaaggtaaggcgcagttattttacctaatgttattgcaataatgaacatcaataagatgtagggtacgatcagtactcgctgggctgccatttgcggataaatttgataaagcaacttcatagtttgatcaataatccagcgaaatgcgctaactataactccagtagttagcccaactgaaattgcttgaaccaaagttttagtcatgttggttgaaaaaaggttttgctaaaatctgttttgcatttttaatcattacatttccccatattacagacgatacatcctttttatcctaacaaaatatagcaaaaaaggcatttatgtttttgatgaatgatcttatttttgtaaaaattgttgttcccaatcatagacattttttatatgcttctttaaagcgttagaggctaacaaaatatcttttttctcaactgcagaaataatatccattatttcctgaaccgaggatttcatacaacgatcattgtctacgatggcataacgcatacgattggtttgagtacgtaaaagatcgatggttcgctgaagcgtgggatttccggtattttcagttaaaaatacatggaatagttcatcaagtttaagataagcttgccaatcatgttttgctaaaatttcttggaattttattccataatcattagccagttgtggatctaaattgggaaaatttttttccaaggcataactctctaatagagaacgtaaatcataattgtcttttaattcagctaatgtaatatggctaacgattttttttgtccttgacgaactagtaagccttcattttccaattgtttgattgcttctctaattggagtacgagacatgttaagtttaatacgcgtttgattttctgataaaagatgacctggcttaaaatgaccagtgtttatttggagactgtaaaatagtttgtgtaaggatgaatgattccttaaatttatttctttaaacattagaaaaaggagttcctttctcgtatgattggtttgaacaaaaaaacacatacagaaagaagaactccttcatgaatgattttaccaaagattttgctcaagctctattcaatccagacaaaataaatgatttattgcgcaaagagctacaacaggctgttaataacttgttagaagctgaattgactgcctttctgggctatgatccctatgccagaaatggctggaatactggcaactctagaaatggtgcttatttccgcaaagttgatacgcaatttggcccaattgaagtgcaagtgcctcgggatcgcaacggtcaatttcatcagcacacgctgcctgactacaagcagcactctgatgttttggaaagcacgattatcaagctatactccaaaggcgtaactaccagagaaatcgctgacttgattgagaaaatgtatggcagtcattatagtccagctcaagtatcaaatatttccaagcagatgctccccaagattgaggcttatcacaagcgcaagctaagcgacaagtttttctgtgtctatttggatgcgacataccttcctttgcgccgagaaacgtttgagcgtgaagcagtatatattgccattggcattaaacctaatggacataaggaagtcattgactactgcattgctcctagtgagaacattgaagtttggacagagatgcttcaaaacatgaagtccagaggcttgaagcacaatgtcattaagttaagacattgacaattaatattagacttttaaagcactgatttaacatttaattggttaaattggtgcttttttcgtacaacaaataaggcatagcacagattctgcttttttaagctacgcgatataaataatatacagctgatttgggcttaatatttctcttgtccttgcggcctggtctaattggaatggtataatagctgatctgaataaggatccgttcaaaatcttgcgttaaagaagaagccaaatacatgctctgaataatcaagcatgattgcttgaaattgatggcatattgatacttgcaatgcttttgcggaatataggcctgtgcatcaatttgactgattgcattaaacataatcatatgggcataaatttccatttcaataaatttatcttgtttggaatggaactgtacactgcctaaagaatacttcaatttcttgaaggaggtctcaataccccaacgcagatgataaagctctttaattctttttagcggataattttttcgatcaagattggttagcacaacttcccattcttctttgcctgatttggcatcattaattctaaatttgcaggctcgaaattttattgtgcataactcgccaaaatcccagcttagatcctgggtatttttagagcgatacttaatatattggcgataatgatgctggacatggtgaatattctcactggctttatgcgtgatgtagtaatagttagaagtagttaccaggcaggaaatctcacgatcacattcttgatcaggcaatgtcgttatttctttaactccgccttgtccagccttagttcgtattatgtaatgacagttaggcaggcgattgcagttttcaatcatattgaaactagtgtagccacgatccattgttacaatatatggaccacaattcaaagctttaagcatttgaacagccgctttgcgttcatccatttctgatttaggctgaaaaatacaatcctggtaggtattattcaatagatcatataaggcattaacgtgaatttgacaatagggtttctttttatgagaagaagcttgtacaatgttattcgatttcggattccagatttgattaaagtcagagccatcaatggcaaacaaacggtagtgatgatcaaaaagttgaatattaaatagattttgattaaaaacagtcagaatatgtttaaaacaagcaggagaaagctggcttttgcgttgaacataggcagaagtactaactactttatcgttctttttagttgcatcttcgccaaaagctctaaagagttcactgtttaaattctgaccttgcatgttaattgtagttttaaggactgtcgctgcatctaaagtgcgtttcctggtaaaagcatgaggattattaataaaatcgtgaatatgatccccagtattattgataatttgatcaagacgttctagaatattcttatgaagggctttcataattaacaccatctttctggcaataattttgaaggtttaaaatatataatatataagataggcgaaaaggctggtcttttcgcctttattttatacaaaaaaagagatcgaatccaaatgattcgatctctaaaaaagcacccttaattgtcaatgtcttaacttaatgacattggcttgaagcaagttgagctttttctttctgatggtgttgttggcatgaaaacagccttggccaggacttatcctaaagctcattttcaacgctgcctggttcatgtcatgcgcaatatctgcgctaaagtacgcgtcgacgatcgtgaaaagatcatgaacgaattcaagcagatacatcaacagacaagcaaaaaagaagctgcagctgtcttgcacaaattctatgccaaatggaataaagcttatagccatgtcatcaaaggtttgaaggaaattgagcccgatctgctagtcttctacaattatcccaaacaaatcagagcttcaatttattcaaccaatatgattgaatcctttaacaacgtcatcaagcgtaaagctaagcctaaggcagaatttccaactgaacagtcgcttgatgcatttattggcatccaggcaatgagctacaatgaccgttatttcaatcgaattcataaaggctttggtcaggttcaggacaccttagaatcctactttgattaaataaataattaaaaaatcaatttacgagaaagaactatttacacaaaagatttgacagtttctattcatttggttctcctaactaagataattttacaacttttttattttttatattatttgcaactaataaaactaaaaacttgtatacaggttatctgtggtaaatcgttgacttacaaaatataagttttactatgtaattgtaagttaaattttgatagaaatgaggaaagaaaaatgactaaaattgcagtacttggtgcaagtggacaaattgctaaattagcagaaaatttatttttggaagataaaaataatgaattaattttatttttacgccatcctaataaattggataaaaaagatatcgatgatcaacgtgaaaggattgtcgtaggggatgcaagtaaattggatgaacttgctccggctattaaaggtgcagatatcgtttatgctaatttagctggttcaaatattgaagatcaagctaagacagttgttaaagctatggatgaagatggtattaagcgtttgatttggatttcctcgttaggagtctatgatgaggtaccaggcaaatttggtgaatggaacaagaatattttaggttcatatttgaccacttatcgtgcagctgctgatcaaattactgctagcgatttggattacacgattattcgtccagcttggttgaccaataaagatgaagttgactatgaaataactgaaggcgcaactaccccatttaaaggaactgaggtctctcgtctaagtgtggctagttatgtaaatgaaatagttaaagaccaaagtaaagacagtcgtggtaatgttggtttaaataaaccaaataccgacggtgataagccagcttggtattaaaacaaaaaaataaagaccagcttcaaactgaaactggtctttattttggcttaattatttttcgaattgtttgccccaagcccatggatcttcgtgccaggtctttaagacatcatattgcgtgctagaaatatgacctgactcattttcctttttgagtaattcagggtaggaaagaagcggagcatatttaacattagctttagcaaagttttcttttgcatccggtaggtagtaggtgaaaattgaagaaacgccaatgacgttgccgccatctttttcagttgctttaactgcatttaaaacggaaccaccagtggtgattaaatcatcgattaaaacgatcttatcatctttactgaagcggccttcaatttggcggcctttgccatggtcctttggcttaggacgaacatagatcattggtaagtgtagtttatctgcaacccatgcagcatggggaataccggcggtagcgacgccaccaataatagtagcctcagggaattctttggcgattaaattagctaaatcaccagcaatcatatcgcgtaattctggatatgaaaccgttaacctaaggtcggtgtaaattggagaaagcatcccacttgcgtaagtgaatggtttgtcaggtgagatagtgataattttttcttgaataagttgactgataatttgatccttatgcattttagttaaactcctttttaattgcttcatatgcagcttctgggtcactggctaaagtaattggccgtccaacaacaatagcgcttgagccccattctttggcttgcgctggtgtggccacgcgagattgatcgtctttagcattgccagcaggccgaattcccggtgtgacatataaaaagtcatcgccaactttttcgtgtaattcttttacttcaagtggtgaacaaataaccccatctgctccagagtgcttagccatttttgctagcgaaagaacttgctctttcattgacagtgcgcaattttgttcatgtgccaatacttcatcagaaatcgaagttaattcggttactgctagtaacttaggcacgcttttgccagcaggtgtacccgcgattaaaccgtctttagctgatttgatcatttgactgccgcctaaagcatgaacggtagtaaaagtaattcctaacttagctaattgtttagccccgttataaacggtattagggatatcatgcaattttagatccaagaaaatcttataaccttgctcagctaagtctttaaccacttggttgccagcgtgatagaataattccataccgactttgataaagacgttttctggtttgcctaatttagacaaaatcttatgcagttgctcttcattgtcaatatctaatgcaacaattacaggtttcatttttcctccacaaaaaaagtctatcttagcgcagagagacaccaaggatagacttttcctagataatttaagtcaatattttgaacttgcggtctctctgtaccgtttaaagtttgatcaaggtgaagtttaacacctcaaaagtaaaaatacaaataaaatttttgcttggaaaaaattataatcacgtgtagaatcatttcttgaaaaaataaagagtgtccgtgagcattcattttggaggaaaattatggttaatacacatgtaaaattaccaggtttagatttgaaaaatccagttatgccagcaagtggaacttttggcttcggcgatgtgcctgcagctaagaagtttgacttaaatgatcttggagcaatggttattaagacaactacgccacatgcaaccacaggtaatccgcaaccacagattgacgttttagatgatggggttttgaattcggttggtcttactaatcctggtgtggaaaaggtgattagtgaaaagttagaaccattgagaaagcaatatccagaattaccgatcgtggctagcgttggcggtgatagtgaagcagattatgttgaagtagcacaaaagctgtcaaattctggcttggttaatgctttagaaattaatgtttcttgtcctaatgtggctcaaggtggaatgagctttggcgtgcatgccgatgtggttgaagaattgactagaaaaattaaagcagttgtcaatattccaatttatgtgaagttaacaccaaatgtgactgatatcactgtaattgctaaagctgccgaaaagggtggtgccgatggcttatcgatgatcaatacattgctagggatgcgaattgacgtgaaaaaacgcagaccactgttaggccataatatgggcggtttatcaggtgaggctgttaagccaatagctattagaatgattagtcaagtgcgtcaaattacttctttgccaattattggcatgggtggcattgcttcggccgaagatgtggtggaatttatgttagcaggtgctaatgccgtagcggttggtactgctcattttaaagatagtattgcttctaagcatattgcagatgccttgccgcaagaacttgaaaaattaggcattgaagatatcaatgaattagttggtcaagtaaaatttaattagagcttgacaaacgtttctaattacagtaactttaaagcaatgaatgtcctttaaaattagtcccgtgaggctagcaaggcaggcttaacttaagtttcgactttactaaagctcctagtctcagttgagattgggagcttttttcatgggcagaattaggaggctataatggcaaaagaaatctgggatgcactagcaatgaagcgtgctttaacccgtattacttacgagatcattgaacaaaataaaggaaccgatgatttggttttggtagggattaaaacgcgaggcgtttacttggctaaacgaattcatgaccgtattcagaaattggaaggcgttgatgtaccagttggtgaattggacattaccttatatcgggatgatcgtcatgatgctagtttaaagcaagatccagttgtcaattctgatcaagttggtgttaatattgatgacaagcatgttgttttgattgatgatgttatctatactggacgaacaatcagagcggcgatggatgctttgatgcacgttggtcgcccaagttcaatcagagtcgcagtgctagttgatcgtggtcaccgtgaattgccaattcgtgctgattttgttggtaaaaatattccaacttctgccgatgaacaggttgctgttaatgtaattgataaggacggcaaagattcagttgaactgaaggctttaccaaaataaaaagaagatagttaaatatccaaccatttaattgactccagagagggccagaagggttgatttcttttcgtgtacacgggaagactctaggcctggagcaattaaatgcttcaggcttttttgtatagaaagaatagaaaatggaaaatttaaatcttgttaatttaccacattttgtgagtgttgaaaatttggatagtaatgaagtagaagccttaatcaggagagctgagtacttcaaaaaaggcggtgcaacaccacgtttaactaagccagtttatgtaactaatatgttttttgaagattcatctagaacacatacgagctttgaaatagctgaaagaaaactaggtttgacagttattccttttgatccggctcattcgtctgttaataagggtgaaaccttatatgacacttcattaattatgaacgccttaggtgtcaacttagaagtgattcgtcactcacagaatgagtattacaatgatttgattaacttaaaagaacatcaacatttaaatattggtgtgattaacgctggagatggtagcggtcaacatcctagccaatgtatgctcgatatgatgactattcatgaacattttggccactttaaaggcttaaaggttgcaattgttggtgatattactaattctagggttgcaaaaagtgacatggaacttttgactaggttgggcgctgaagtttacttctcaggtccaagttactggtatgataaagaattcgatcaatatggtaagtatgaagaaattgatcaattagtttcaaatatggacgtgatgatactcttacgggttcaacatgaacgtcatgcaggcgatcctaatgaaaagacttttaatgctaaagcatatcacgaaaaatatggtattaatcatcaacgctatagtgcattgaagcccgacaccatcatcatgcatccgggtccaattaaccatgatgttgaacttagcggtgatttagttgaaagcgataagtgcatgtttgtcagacaaatgcaaaatggtgtgttcatgcgtatggcaatgatcgaggcagtattgcgcggtagacgacttggaggattagaataatggcaacagtaattaagaatggcacagtttatcaaaatggtcgtctaattaaagcagatgttttaattgaagatcaaaagattaaagcaatagggactaacttaacggcagataaagagattgatgcaagtggcaagctagttagtcctggactggttgatgtccacgttcattatcgtgatcccggacaaacttacaaggaagatattaaaaccggtagtgaagccgctgctcatggtggttttactatggtaggggcaatgcctaatgtaacgcctgtacctaatacgcctgagctaatgcaaaaaatggtacaagaaaacaatgaaaaaggtgtggttcatatttttcaatatggaccaatcactaatgatgaaactactgatgtcattcctgattatgcagcattgaaaaaggtaggtgcttttgccttaagtaatgatggtcatggagtccaaactgctcaaacgatgtatttggcaatgcaaaaagccaaggaaaataatttgatcattgctactcatgcacaagacgattcgctttttaataaagggatcgtgaatgaaggacctaaagccaaggaattaaacttgccgccagtaactgaattagcagaaacaacgcaaattgctagagacttgcttttagcacaaaaaacgggcgtccattatcatatttgccatgtatcaactaaaactagtgtggaactggttcgaatggctaaggcgcgtggaatcaatgttacctgtgaagtagcgccacaccatattttattaacagatgacgatattcctaaggacaacggttattataagatgaatccgccattgagaaataaggaagatcaagcggcgttactagtgggactactagacggtacaatcgatttaattgcgactgaccatgctcctcatgctcgcaatgaaaaagaaggtggcatgaagggcgcagcctttggtattactggtagtgaaacagcattttctactttatatactaaatttgtcaaagaagaaaaagtcttcaccttggagcagcttttatcatggctctccgataaaccagctaaaacgtttggcttaaaaaatgccggggtacttgaaccaggtaagccagctgatattgcgatttttgacttagaccatgaaactgaattaaaagaagaagactataagtcaaaaggcgttaatacaccatttacgggcgacaaggtgtatggtgaaactgtaatgaccatggttgatggtcaggttgtatacagaagggatgaacaataatgcggtatttaatcctagaagatggtagcatctatgctggcgagggttttggcgctgattgcgaaacagttggtgaagttgtatttacaacagggatgactggttatcaagaagcaattaccgaccaatcttatgccgatcagattttggttttcactaatcctttaattggaaactatggtattaccttggcagattatgagtcacttgagccaaggatcaaaggcgtaatttgtcaccaggttgcccgtcatcctgataattggcgaatgcagacaaccttaccaaagtttttggagcatttgaacattccaggtattcagggaattgacacgcgtgaattagttaaaaaattgagagttcacggtacattacgtggtaagattgcagattcaaaagaaaatgcagaaaaaattgcggcagaattaaagactaagaatgtaactcaaggtgtaattagccgagtatcaaccaagtcaccatatccagttcctggttcgaaacgcaatattgtggttatcgactttggaattaaacacagtattttgcgtgaactagcagaacgtgattgtaattgtattgttttaccatatacagctactgcccaagaagtattaaaccttcatccagatggtgttcttttgagtaacggccctggtgatccagaagaaatggtagaggcaactaaaatggtgcgtgaagtagaaaagcatgttcctttgatgggaatttgtatgggacaccaagtctttgctttagctaatggggctaaaacttacaagatgaaatttgggcaccgcggttttaatcaccctgtacgagagattgcaactggtaatattggttttacttcacaaaaccatggttatgctgtgtctgcagattcaattgacaaggataacttaatgattacccacgttgaagtcaatgatgggacggttgaaggattacgtcataagaaatatcctgcattttcagtgcaatttcaccctgatgcaacaccgggtcctcatgatgaggtttcattattcgacgactttatgtcaatgattgatcagagaaaggaagaagagcgtcatgcctaaaagaacagatattcataagattatggtgattggctcaggtccaattattattggtcaagctgcagaatttgattattctggtacacaggcatgcttggctctgcgcgaagaaggctatgaagtagttttagttaattccaacccagctacgatcatgactgatacaacaattgcagataaggtgtacattgaacctctgacagttgaatcgatttcacgaattattcgtcaagaatatcctgatgctattttgccaacacttggcggtcaagtgggcttaaacatggctatggaacttgccaaaacaggaattttggatgaattacacatcgagcttctaggtactaagctgcaatctattgaacaagccgaagaccgtgaaaaatttaaggaattatgtaagtcattaggtgaaccagttccaccttctaagacagttaatacagtcgaagatgccttagcttttggagatgagattggctatccgatcattgttcgtcctgcctttacaatgggtggtaccggtggtggtatctgtaataatcatgaagaattagcagagattgccaaaaatggattggaactttcccctgtaactgaatgtttgattgaaaaatcaattgcgggctataaagaagtagaatttgaagtaatgcgcgaccatgatgacaatgcaatgattgtctgctgcatggaaaactttgatccggtagggattcacactggtgattcaattgtcttttcaccaagtcaaactttatctgataaggaatatcagatgcttcgtgattgttcactgcgtttgattagggctttgaaaattgaagggggatgcaacgttcaacttgctcttgacccaaatagctttaattatgatgtaattgaagtaaatccgcgtgtttcaagatcatctgctttagcttctaaggcaactggttatccaattgctaagatggctgctaaaattgcagtaggaatgactttggatgaaattaagaacccagtaacgggaacaacctatgcagaatttgaacctgcattagactatgtagtctgcaagataccacgctggccatttgataagttccctaaggctgatcgcgttttgggcacccaaatgaaagcaaccggtgaagttatggcaattggccgtactgcagaagaagctatgcaaaaagcggtaagatcactagaaattgatgaaaaagatctttactcaccagaagcacacgtagctagtgatgaccaattagagcaaaaattagtcaaagctcaagatgatcgtctcttctatttagctgaggcatttagacgtggttattcagctgaagatgttcatgaattaacgaagattaatttctactttttagatatcgtgcaacatatggttgaattggaaaagacacttgaggaaaataaagatgatgttgatgtattgcgcttagctaagaaatatggctttagtgatccaacgattgcctctttgtggaatgaaactgcagatgaggtaagagcatttcggaaaaagcatggcatcatcccagtctacaagatggttgatacatgtgctgctgagtttgaatcaaagacaccatacttttattcaacttatgatgctgaaaatgaatcacataagactggtaagaagtcggtgatcgttattggctcaggtccaatcagaatcggtcaaggtgttgaattcgattatgcgactgttcactgtgtcaaggccttgcaaaagatgggctacgaagcaattgttatcaattctaatcctgaaactgtttcaactgacttctctatctcagataaattatactttgaaccattaactttggaagatgtcttgaatgtctgcgacttggaaaagccagaaggcgtgattgttcaatttggtggtcaaacctcaatcaatttggctcatggcttagaagaacatggcgtcaagattttaggcactaaagtagctgatgttaaccgtgcagaagaccgtgaactgtttgatcaaatcattaagcaacttcatttgaatcagcctcaaggtttaactgcaactactcatgaaggcgtacttgaagctgctgataagctaggctatccagttttagtccgtccaagttatgttttgggtggtaaggcgatggaaattgtctacaccaagggagagttagaagaatacttgcaagaccacgttgatattgcagcagaccacccaatcttggttgatgattatcttgatggtcgtgaatgtgatgttgatgcaattagtgatggtaaggaagttcttttgccaggaatcatggaacatattgagcatgccggtgtccactctggtgactcaatggctgtttatccaccacaaaccttctctgatgaagttaaagaaaagattactgatgtcactagaaagcttgctttgactttgaactgtgtcggcattatgaacattcaattcattgtcagagatggtgaagtttacgtaattgaagttaaccctcgggcaagtagaacagtgccatttttaagcaagatcacgggtattgaaatggctcaggtcgctacccgagtaattatgggcgaaagtttggctgaacagggctacggtgatggtcttgccccagagccagacatgatctctgttaaagcaccagtcttctccttcagcaaattatcggacgttgatgcatatctcgggccagaaatgaaatcgacaggtgaagtaatggggagtgatcacacttttgccaaagctctctacaaagcttttgcaggtgctaagatgcaattgcctgaaaatggtaatgtattacttaccatcgaagatcgagacaaagaaaagattttaccaattgccaagagatttgcgcggattggctacagaatctttgctactaagggtacagctgatttcttgcgcagtcataatttgcatgttgatccagtaactaaagtgcatgaagatgaagacgccaaggataatatcttgaatgaattaagaaatggcaagattgacttggttatcaatacgatgggtcacgatattgaaaagaattctgatggcttcatcattagacaggttgccattggtcaaaatgtaccattaattacagcacttgatactgcagatgctttgcttactagcttggagaatagatcatttgctactgatgctttgaagtaggatagttgaatagataaaaataatgcatttctctattgaagtaggagaatgcattattttttatgcaaaaaattattttcacaagtgagctaataattctgagataaataaacgatagatagcattcaatcaagatattgtgaaaaaaatatgtatcacaaactttattatagagccatgagtaagagtatttcactatctttcgtaagcgaatacatttataatctgagataaggaagtgaagtgtttaggggggaataaaaatgtggatttcgtttttattggctttaattccaattatttggcttatttactctttggcaattcgaaaaacgcctgctattaaagcatgcagcattggactattaattactatcgtattggctatactgggatttaacctctctatagttgacactttgacgggtgctttagagggcattctgatggggctatggccaattgtttatgtaatcgtggctgcactgtttacttataatgtaagcaattattcaggtggaattaaaattattcaagatactttgtcgtcaatcactactgatcagcgtattttagttttgattatcgcatggggatttggcggattcttagaagcaattgcaggttttgggacagcagttgcaattcccgctgggatattaattggatttggtcttaatccgattaatgccgccgtaatttgtttaattgctaatactacaccaactgcctttggtgcaattggattaccagtgattacactgagtgacgtaactaatttgcccgttactccattatcatttgttattactttacaacttgcattattaattattataattccgtttttattggtgattctaacaggtggcggagttaaagctatcaaaggagtgggattaattaccctgatgtctggtttgtcattttcaattccgcaaattttggtagcaaaatttgttggtccagagttaccagcaattgttggttcaatttgttgtattttgactacagttctgatggcaaaattatatcatcatcaagataatgacataaaagagaatattgagaagcacagcgctatcgaaattttgcgtgcaagttcaccatttattttagtgttcgtatttgtggttcttgcttcatcactgtttccagatattcagcatctattgggaaaagtgacttcttatattaaggtatatactgggaaagatacagaactgtttaagattaattggctttcttcaccaggaacattaattttgctagctacttttattggtggattaattcaaaaagttagtttcaagaaattaggacaaatcttaaaatcaacaatttttggattgtggaaaacattaattacaatttgttctattgtggctttagccaaggtaatgggctacgcaggaatgacttcagcaattgcggcagcattagtagttctaatgggaccaatatatccattagttgcaccgttaattggtgcttggggtacgtttattacaggatctgatacctcagctaatgttctttttggtaacctgcaattgtcttcagctaaggctttaggcgtaaatagtaattgggtagttggttcaaatatggtgggagcaactgctggaaagatgatctcacctcagagtatagctgttgcttcagctgcaattggacaagatggatctgaatcaataattttgaagcaagtggctaaatggtgcttattgtatttgggaataatttgtatattcctatatggaataggctttgccgtaggatttttataaaaataatttaaataactcttggtgttctgatatatattgatttgcacttgtcatccattaatagtaaatcgcttgcattaaaagcgctttcgttgatagaatgctttttgtaacttttttacattaataagggagacaaaacgaatgagttatttatttctgtttattccggcaataggatggggtcttatgcccatgtttgttgctggtgtcaagaagagtaacatttaccaccaaattttaggtaccgttattggtgcatttatctttggtgctgcagttactctcattaagcgtccatcttttaatgcgactacttttattttagcaatgttagctggtgctgcttgggttattggtcaagttggtcagtattacagttattccaaggttggggtttctgaaactatgccaatttcaactggtttgcagttgatcggagtgccacttgtaggtgtgttgatctttggtgaatgggcaagcactcaagctaaattgtttggatttttagggatcttagctttaattattggtgtagcatttacatcattgactgacaaaggtacatctgagggtggaaaaaagaatcagaccactacaatgattgtgctggtattgactacacttggttacattacttcaagttccattccaaaggccttgaagggtgacagcgtaatgattttctttgctgaaaccattggaatgttggttgcagcaattgtttatttaattgcaactaagcaaacacaagtctttaaggaaaaagaaagttatcaagtaattcctgccggtgtgatttacgcaattgctgctcttgcatacattgtttcagttaagatgaacggtgtaaacctagcctttgttatgtcacaactttgtgttgttatttctactcttggtggtatccttttcttacacgaaaagaagacacaaaaaggtcttatttatactgtgatcggtttaatattaattgttgccggtgcagttttgacctcagtattttaatgaattttaaataaatattgaatgaactccaacatgataattgttggagtttttgagtaaaaaagtcatgaataaatataaaatgaattaaaatataagtagaagccaaagagaggatgatttctatgagtgataatacagtatacgtgatcgacggtcgtcggtatgcacgtaatggagaaattgtcgaacataatgtgcatgtttatagttcttatcaaaatctgattgctgcatttaagccatttttggaagtttcaaataaagaagtgcatatgaatggcaaaaatgagatgcttcaggttagaatatatgatccatcaaatcaatttttgacaaaatataaatttgatatttatgaaaagaaaatagataatttctttccaagtactactgaacatatttagcaaaggaatgatccgatgacttttaacaaagaagaaaaagagcaagctttaaagcggctaactgatgaggaatataacgtaactcaaaaggctgctacagaatatccttttaccggaaaatatgatgatttttatgaaaaggggatttacgttgatgtagtgtcaggtgagccacttttttcaagcttagataagtataatgcaggctgtggttggcctagttttactaagccaattaagaaattaacttaccaccgcgatcaatcgcacggaatggagagaacagaagttaaaagtcccgaagctgattctcacttaggtcatgtttttactgacggcccagtggatcaaggtggtttacgttactgcattaattccgcagcattgagatttattccatatgatcagttggaacaggctggctatggtgaatataagaaaatatttgaataaaaaattatttctcatagaacttaatttcagtattggccaaatcaactgtataagtttcttcttcaagtggtcgtttagtcattccttcatcagttgagtagatgatcaaggccaacttactaccagatggaagagtgtagtaggtaggttgaagcaagaagtctaaatcgtagaacttgtcagcatcaatcttctcaggtcttttcatgtccttatagttttgtaagttcatgtgacccttagtgatcaacttagccttagtcttcttgtccggcacaaattcttgcaaagtatcagtgccaaatctatagccaagttcttgaccgccgcgcattaagaacttaggtgtagcggttaagcgtcttctttctcccaattcaactaaagcaacagaaatttgtcccttaggtaagctgcctttaactctaacttttacttcaggacgaccgacaatcgtagttgggtgaataaattcgtctgtttcaaaacgcaaacttggtttagcccatttttcatcaccacagatgaacttgtatagccagtcgctttctgagatgtcagccttcttaaattcaatgccaccttcatcgacaaatgattgttgtgcattgccattgccatcttggaaaagctcgccgtcatcagttgggtagtaggtcttcttttgacctaattcatttgaccaatccttttcttcgtgccacttgtcagcttgcaagttgtcctggatcatgacggttggccattgcttgtaagcattgttttcaatccctagtaattcatgtacaaaccaaaggttcattaagtcagtaaaatcaatagaaacaaagttgttcatattgtagtgaggaccttggtgtaggaaaagatgatgcttcattggcatttttttgactagttgccaaattttataaacattctttggcttaacgttccagtcatttaaaccgtgaacagaaatccaagaacatttgatgccgtcagcgtgatggcggtagtttcttgcttcccaaaagttggaatattgaccggtttcacggtcttcttttgttaaaagctctttttgcatcttgtcgtattccggtttgatcttcaagtaagaacctgcatcccacaagtttgattgacaagtttcagccagtaaatcaaggtcttcaccttggcaggcttcgggtgcgattaccaaaccgtgttcacggtaatagtcataccaagaagaaatagcagcttcagaaaccacagttttcaaacctttaaccccagtagtggcaatagcaatttgcaaagtgcctaaatatgaacgaccagtcatcccgatattgccattgcaccagtcagctttggtttgaacagatctagtacggtcagtgtaagcaatacgatcgccgtggagccattcgataactgcagcagctgattcagtttcttcaggtgcaccagtaatacgaaccccatcactaccacgggtaccgattgctccagcaaaaacactggcaaaaccacgagcaagcatatactcatttaatggataagaagatttatgtactgcttcttcggtagctgggtggttagagtcgtctggctgctttgctttaactattggtgcatgaacatattgtggatcattccaatcggcggcatcagataaattttcatcaacattatggttacgcttttcattagcgataattccgccgaaatatggtgaagcagtataaagggcaggcacttttaagcctttgttagtttcagctggtcggaaaacagtaacttgaatcaagtcactcttaccatcatgatcagtatcaagatcagtttcaacgtaaacaacttcacgaattactttgttggtatcgaagacaggaatagctttgccattgaaaaatttaaacttattttgtccccagaattgagtaaagtaccccttaccagccattacatcgagcaaaatttgaccgtttttggcgcgagtattgagcaaacgataaaaagcagagattaactttttgacatcagaaatgtcttggacaaaaggtaaagcattcttttgcataaagccagttggatcgactaattcgtagtcataatgaacatgatagccaagtaattgtaaggctacattatagaattgagcagtaccaattgattcaggctttccttttaaaaagtcagctaaagtttgctcatttgaaacagcaaattcagataattttgttgtcttagcagcgtcagtttttgcttcagcaattgtcattttaacgagcttgcccagcaaatcgttaaaattccagtctgcataatttttaggtaagaaattgatgtcgattaattcttttacttgttgatcgaagtcagtttcgacataagcgtattggttatatttcatatttttctcctttgcagtttaattactttctattttacttttaattgtggctataaccaatagatatggaagttaataagcgaaaaatatttttattttggtattcttttctttaaaatgaacttaaacaaatgggggatgctaaatgagaaaaaagttttcacttgtcttgctacttacaacgatatttacaatttcgctgacagcttgtactaatcagaataaggttgatcatactaaaagtcagactaaaatcacctcaacaccgacattatttttccacggtgtggttcgtcatatcatactgaagaacacatggtggcagcagctgagaaagctggagtcacgaactcagtgattagagctgaggtggcgcctaacggtaaggtttctttgagtggaagttggaaaaaaggtgccaaaaatccaattgcagaagtcaattatgaaaataaccgtgagttgaacttttctcgacatggtgtttacgccactaatgtagtgaaggctctgcaaaagcgttatggtattaaaaaatgaaccattctttaggaaatatttcgatcatttattatatgctgcaaaatggacgtaaccggaagatgccacaattagtcaagcaagtcggcatggcaggacattttgctggtttgaactttagccgtgttcccgcctcaattcgtcaacctaaaggtttaaaattgaattctgccggaaaaccgaacaaaatgaattctagctattggcaaatgacgggtgtaagagaaacatatccgaaaaataaagttcgtgttttaaacatcattggtgatattggtggtcaaaccgatggaacagtacccaatgtatcatctttgtcattaaagtatttagtggcagatcgtgctaaaagctatcaggtagtgaagtttactggaaaaaatgcacgtcactccaagttgcatgagaatccaaaagtagataaagtattaatcaaattcctgtggaataaataaagttagtaataggcatgcgaacgtatgtctattttttgtgccttttcttaatccaattacttgaattataaaataatgcgtgtataatattcatctaattaataaagaaagggcatggttttatgaagctattaaagactaaaatcttaacaattctgtgtggcttgctaacattgaacggcttagccatgttgttttcaggattgattatccaaatggacgaagttgctgattttgattcagcccaaagtttagcagttgctaattcgactaatgccattattttggcaggaattattatgattttgctttttggggcattgtttttcgatggttgggctaagctcaagaacaggcatgctaagcacgttaagttagtttaatagaatagataagactagctctgaagtgagctggtctttttttgcccaaaattaaagtcttctttaccgtttttttacttttgcatgtgataatgagccaaaattaatcagggggatagttatgggattctggtattattatgttttgccattagtgacggctattttattcgtttggctaggaaaccgagttatggtgactaaaaaatggattagcataattttttactcattagctggagtaggctatttaattgcatcggtttttgctgttttttatatctatgcaacagtagaagaaattttaacgccagatattttaacaaaaataggttggcattatttttggagtgataattttatttttcttcttaccagcactgttctattaacaattagctattttgtactaaaacgtggtagattacggatgaaataggatgctcaaaaatgataagattatttttggaaaaaatagaataatgatggggtgaaaaaatgactttaccatttaaggcagttgctgtagatatggacggcacgtttttagatgatcgtaagcagtttaatcacaaggaatttgatcaaattttgactgaatttgaacaacgaggagtacattttatcgtggcttcagggcgtccttatgttagattgaagcaggactttggcaagtttgccagcagaatggatttcgtaactttgaatggctcgagattaatcatcaagggtcaagaagctggcagttatttgcttaatcgcgatgacgttttaaagctaattcatgatgtacatgtgaaatatggtgaaatggctacgatggtttttggccgagatattgcatatttgcatagcaatgttgaaaaagatgaacgcgactttttggcttactttgctggtaatagcactgtaattaatgactggaatgacttaccagataagatttatcagatcacatttggaatggacagttctaaggctgcagaaattgaacgagattttaattctaagcacgataaccagatttctgcttttgcttccgctacttttgccattgatgttaacacacaaggtgttaataaaggcgccggattaaagcatctcctagaaaagatggggatgacaggggatgacctgattgcctttggcgatgggggtaatgacatcgatatgttgaaatttgccaaatattcttatgcaatggcaaacggtatggacaaggtaaaaaagcaggcgaaatatattgcaccggccaatacggagaacggtgttttcaaagttttgcaaaaatatttagctgaagataaaaaatagcttgtaaaattaaattaatatgatatagttttaattaacttatagaaatagaggaaattgccatatgattcgtttactgaatctctaatatttgatttgttgtttagcaaaatactgtctttgcaccttgtttagtgcacccattttttgcttgcataccaagtattagcagtagatgaattgagggtggttttctttatcgaaatcaacctttatttgttgcactgttaataggatgtgagcatccagaacagtgctttttctttgcgacaaatcatgttagagatttttttgctgattatacgtttttgtcaaaaaagaatgaagaaaataatgggtttaagagattatattaaagctaaccgtcagcgggcaatgttagttctgtttttgattacgctaacgcaactgacaactacaatgtacacctacttaactagtccgcagttaaatgcaattgcaagtggtaaattcgaactgtttttggaattaatctttgtacaatttttaattggacaggtctgcaatgtcagttttaattggggaagtttacaaaataccaaacaaacacagacactttttcatcaggtaagacagcgaattatacgacattattatcagcagcctgaagacaaagtctcagagatggaaaatcatttgggaaatgacttgcagttagtgcaagagagttactataatgtttacttctattttgtttgtgacttaatttatattattttaactattggtacgctgtttacctttcattggatattggttgtctatacattattagttactttgcttgcagtagtagtgccgaaattgactgaaaaatataccaatcgagcaactaaagctgtttctatccaaaataagcaatttttgcagttgttagaaaaatggttcaagggtttagatgagctgcgacgctaccagaataaagttgttttgaaaaaggtggtgggacaacagagtcagaaactagagcagagtgaatatcagcgagataaattgctacattatactagcttagtgtctgcgatatttaatatagctggtcgtgttggtgttccatttattgctggaattttgtttttcaatcatcaggtaaatttaggagcgattctgacagcgggatattttgccaatggaattttttatagtgtagatagttgcgtgaacagatatacgcaattaaaatcaacgaaaactttgcgggatgatctggctaaattgcaaaagtgtttaccagaaaaagggtatgattctttaaaacaaatcgctaccgttcaaataaaaagcttgtcagtacaatatccaaatggtgaaagaattacttatcctgactttgaactgaagaatggtgaaaaggttgtattgactggtgattcaggtacaggaaaatcaactttattaaaagttttgttagggcaaattaagccaagtacgggtgaagtaatctattgcgataaaacaggaaaaaagatcaaacctgatttacgtcaattaggttatttggcacaggacttattgatctttcctggcagtattcaagaaaatattactatgtttaagcctaagcttaataaaaaaactgtacaagtgattcataagacggtttttgatagtgatcaagcgcgtttgaaaaatgggatagagacacagcttgatccacaacaggaattgctgtctggtggacagaaacaaaaggtagttttaatgcgggcgttgttgcatgagaagccgattctgtacttagatgaagcaactagtgcaattgatcaacaagcaacgacaaaaatcttccaaaacttaatgcaaagtagagcaacaattttggccgttgcacacaatttaaccgtagaacaacgagcattgtttgatcgtgaagttcacttggagggaaaataatgagtagcaaagaattatttaaacttaatccaattaaattctgtctggctatgggactacagattattgcagcagttggcgaagtagttgtagattatgtgttaactttgcaatttgatgctgccaaaaatagaaacttgagtttatttttaacttggacattaatccagctgtctagctatgtcatggtattcttattctataatttggcgggaatcatttggcaaaagttgattcaaaattacctgcatttaattcggcaagaactaacagatcattattttgccgatagtcaaaagcatgcggttagtgcagtgcaaaatcggatgactaatgatttgaaactgttacataatgactatttagattcgttccgctatgtagtagggatgctagccggtattgtcggtgtagcctttagcttggtgacttttcagtggagtttgttagttgcttgtttaatttttgccgcaattcagatttatttacctaaattactggataagccattacaaaaagctactgaaaaggtatcagtagctaatcgaaagtatttgaagactttaggtgattggttaattggcttatcagaagttcgtcgctatttggctagcgataagctttttaagactattgctgaaaattcaggacgcttggaagcagcaaatattgagaaggaaaaagtagatcaggaattagattatctgaatcaattggcttattcattaggagatgtgctaatctttcttttaactggatttttggtagtaaataattgggctgcttttggtttgattgccagcattggcaacttcaatggagcactatttggttctttgcaaggagttgctaattatggtggaagaatgcgagcaacaaagaaattgcgagaagagatttttgtagctaaaaagaaaattcagtctgaacagaaaagtaatttagaacaagcggttagtttttcaatccataatttagctatcgattttagaaacggtgaggccgtgactttcccagatttccaagttaaagctggagagaaaattttactaacaggtgattcaggtacaggaaaatcaactttactcaaattgattttaggtgaattgcaagccagtcgcggcaagattcaatactttaatcaaaagggtgaaaagattcaacctgatttagctgaaattggctatttgccgcaagatccagtgttattcccagtaacgattgttgaaaatattacgatgttcaattcaaaattgctaagtcgagttaaatcagccattgaaaaagttcaatttgcaggagatattgctaagttttcggccggcattgagactaagattggccttgatcaattgaatgtttctggtggtcagaggcagaaaattgttttagctagaagcatggtacaccagagtaagttgattttgattgatgaggcaacaagtgcaattgatcaggcggctacgatgaaaattttgcgtcagttgactaagacggatgcaacgattgtattcattgctcacaactttaatcaagaaatgcatcaattgtttgatcgtgaaattcatttaaagaaataaaaacaagctcataaccacaaagttacaggttatgggcttgttttattatagccaaatttgttcgaaaatatcttctttaaaaccgcaagttaaattactgtcatcaacgactaatggccgcttgattaacttaccattttttgacatcatatctgcagcttcttcaatcgtcattgttggcactttttctttcaaattttctctgcggtaatcttgaccgtgtgtattgaagaaatattttagaccacgatcttgatatttggtcatccattttaccaagtcttctttttttggtggctgttcaactaaatcttgaaattcgtagttgacctgatggtcatccatccacttgcgtgctttacgtgaggtagagcaacgtttataaccataaaatttaatcattattttccgtccttatttttgtaaaaattttctaaaaaattcaatttcttcatcatttgcgatgtcagctaattcatctttttgatcaacaaagaaaacatgaccacgtggattttcctcatcgccataagatttgcaaatagcatgaacgccgcggccgagtaagaagccaaacagggtaaattgcatgtcatgtaagaaatctttgttggcagtaatcaaaaaagttggtaggaaattatgattgatatatttttcaacatcgagttgttcatgatacttgttaactgcatttttagtgaagtaggcgctagccatgccatctaaattgcttggggttaacatgaaggaagcagcacaattcaagccgacagccctaaattttaagttcaatggtttgtaagaaaataacttggcataatctggattagtcaaaatagtgacatactgctcagccatttgaccaccggcgctgtcgccaacgataaaaacgttgttgcgatctagacgatattcttcagcgtgctcatcaacccaatgcatgtagcgatcaacatcgtctaattcatcagggaattccgcgttttctggtgcaagacgatagttgggattgatgaaagcaaaaccgcgcttagctaaacccattccataatattggtagatttctttagtaccataaacccaaccaccgccgtgaatattgatgatgacagggaagggagcttcgtgctttttgggtaaataaacatctaaagtatgccacttttcatctggaccataaggcagattatcaagacgttcaacttcagggatgtcgtgaggcaagccactgtcacgtttggtgtcatgctgatatgcaccatctctaaagtcagtaacaaactttttgattttatctttaagttccataattgttctcttttctaataattatctatgttaactcaattatactttaattgaatttgaaaaaataaaaacttttttgaaaaatcctcttgcattttaattaacgtttccctataatagtctatgttctgttgaggacgtacaaacatacaagatggtctggtagctcagctggatagagcaacagtcttctaaactgtgggtcgtgggttcgaatctcacccggatcataaattatgcctgtaagcattggtcttacaggctttttacataccttaggtatctatgtgctaaattttactacaaagacaatatttttttacatttgatattgtatgatacaaatatatgacaattattaacttaatcttacattattagtgaatcagttgactaaagtttggaacgagcttattctaaaattgatttccaaaaaataggatcgacaagtgtgaacgacaactatttttaacattatcggaggaattaagattgactacaaccaaaaaaatcattgttagattggcatgcgcgactgttcttggtacggcaggggtagcgctgacacaagtaaatataccacaaactgcagttgtgaacgctgcaactacctctgttgcagcccgcgcacttggagttgatgttgctagttatcaaaacgctgacttgtcaagtcatgcgcaagctggagcacaatttgcaattgttaaagttagcgaaggtacttcctatcgtaaccctaaggcatcaagtcaaatttcaacggctttatcaaataatatgatgccaatggcatatcactttgctacttttagttcaaatgcaagtgctgctgctgcagaagcaaattatgcagttcaagctgcccaagcattcggcttacctaaaggttcatatattgcttgtgattatgaaacaggttcgggcaataacatttacggtggtaaaacgccaacggctaatgcaattattgcttttatggacactataaaaaatgcaggctataagccacttctttatgctagttcatcagttttacaaaataatattgatactaatagtgtaattgccaagtatcctaactcattgtgggtcgcttcatacgctatttcaggtagaattgatagtccaaacttcaattacttcccatcaatgaatggcgtttcaatttggcaatttactgataattggaagggattaagcgttgatggaaatattgctgttttaccattatcaattgacggtaatgtaacttccaacaatggcgcaatttcacaagctccagctaccagcaacaccaattctgctagctcttcaaatgcttcatcaaatacttcgaataagagtacttcatcagatgatgataagggttcagcaactgctggctatgtgatgaagaaatcatatatctataataaaaagggtgagcgtcaaagcggctactatgcagcttatactaatattactcattatggtgtagtgactcttgataatggtaagactgccttaaacatgggcaatggtcgttacattatggcaagtaatgttttaggtaattcacgtgtacttaagcacaatgcttatgtatataataacaagggaaaccgcgctaactggagagtgcttagaaaaggtacgccaattaagacctatggttcacggatgcgcgttaatggtaaaagctgttaccgaatcggacgtaacatgtacgttaaggcggctaacttttaattaaaaaattgaatttatcaagaaggaattaagcttaaaggtttaattccttttttcatgccgttttttgtataattaaaagtattcaggaaacgcctgaattaattaactgatagggatgaaataaacttgaaaaaaagatttatagcaataatattgatgctactgactttaacgggttgtactataaaaagtactacgcctaagaaggctaagtcgtcagttaaaacggttaaagtcgataaacagcaatctaaggaaaaacaggctaagtatcaagtgatagaccaagttttgcgaattcaacaagatggcgttgatatttatggtcatatatatctaccacagggtttagctggtaagaagaaagcagtaattttggctcacggattggcaggaaattaccgtgatctaaccagttatgctaaatatttagctagttgtggctatgttgcctatacttttgattttcctggtggagctaagaatggtcaaagtagtggtgtagatcaattaaagatgtcaatttttacagaagaaaagaatctacagctggtattaaatacaattaaaaataggactgatgttgaccgtaaacaagtgtctttgctaggcgagagtcaaggtggagcagttgccgcaatgctcgcaagtaaatatccgcaagaagtaaagtcattgattttgctttaccctgccttttcgatcactgattatgcgaaagcggcttttaaatcagaaaaacaagtgccagacaagctcaacctatttggcttcacaattggtaaggcctattttgaaaacttgttcaagtataacttgttaaaagaagcaactaagtatcatggtccagttttaataatgcatggtacaagtgacatgattattccagattcttattcaattatggctaataaaaaatttaagcactcgaaattatacttatttaagggtgcaggtcatgattttaaaggtaaatatcatagtcgagcagatactttaattgataaatttttgcagaaaaatgggaaataaataatgaagaagaaataccttggtttattggctttattaagcctattgagcgtttttgctatttggggtcaaagcgttagagctgatgttgattatgatattgataatgttagagccatagcaagagttaataaagatggttcactgacaatgtatcgaacaattaagtattcatttgatagtgatgctcgtggcctttattataagcaaaatctggctgtaaaacagaagttgagcaacattcaggttaaggtcgatggacaaaatataaaggccgcaacaacgggcaaaaataatacgtataaattgcaaaagcagggcaattcttataattttaaggtttatcatcgaattaaggaaaatgataaggttaaagttgagtattcttatctaattcaccgggcaattactaattatcttgatacagctgagctgaactttaaaatagttggtaatggttgggatactgacttagatcatgtgcgtgctgaagtgatttttcctggggcagttaaggggctaaaagcttgggctcatgggccactaagtggttacactcaggttttgccaaaagagggcaaaattattatgactgctgatgatgttgcaggagatagtggtgtcgaagtacatgcgatttttccaactacggtaactagtgctaatcagaatattgttaaagaaaataagaaaagagcaattgaaaaacaagaagcagcattagcaaaagaagctaatcagaagcgtcagcgtaagcagatgcttagtataggattgatgatcatttcagtacttgtcggttttgtggtgataattagaggcttttttattaaaaaagttggggttaagccaaaaatagagcgcgatttagtacataattatgaaattccagatatatcacctactgctgcgcaaattttggatgaagctgataaaccaaatgttaaagcatttacagcttatttgatgcaattagccggtaaaaataaaattaagatcgaaaaatatcaaactaaacatttaaagcggactaattatcgaattactttagtagatgatagtgttttgactgatgacctattagattttatttttaacaaagttggtgatggtaagtcatttacaacgaaagatttgcgggattatacttctaaaaaattgggtaggcgttttgataaatggtgtgacgggcaatataagcaagttgaggataaggacttgcttgataaaaaatataaaaagcagcgtagcaacttccgaacggggatgctcatgggaatgattgctagctttgcgatctgggtaattagcttaatgatggcaaataatatacccagttttgtgataataattggaatcatgatgatcgtcttagaagttgctgcattcatagtgggcaattctcgtttaagtatttatacccaaaaaggtgcacttgagacagatcaagttcgctgctttaagaaaatgctagacgatattggtcaattcaagatgaaagacgtcggtgatctgattttatgggaagacattatgccgtatgctgtagcgtttggtctatccaaaaaggtattgaagcagcttaagattgaatttgcagatgaattagatgctgcaccagttctgttttatagtggattctatagtagcagtagtgacagttttgagcatagttttgaacgtagcttctcttcaggcgtgtctactggtttatcttcagtttccggaagctcaggtggattttcaggtggatcgtctggcggctttggtggtggcagcggcggtggtgctttttagtgagaaatttttatactataactgaaaattgaaagcaccaaaatcaagctcaagtcctgtcactattgagctttcttagacgtaattagtttttatatgatctgtttcagtgcaatttgtatgaatcgtggcagttggttaataaagtcattgattacttcatctatcttttcaaaactattctgtttaagctcttttaattctgaaattaagtagaccaatgcatctacgaatctaatatcaggtaaggattcgttcattagatagaataaatctccgattgtcttatcatctgtattttgtctttcctgccaggtcaatagatcataagttattgctgtaactgcgatatagccacattggccatcatagctttgaacttgagatttatctaaagcaagatattgcttagacgtcttaaaatatgtttcaatttgccatctacgaccataaagttggatgatttcttcagggctaagctttgtctgagtagtagctaaaaccaaatacttgttcttgtttccacggttggagacaaagacgagctttaataaaaagctatgtccatgatattgagcctcaactatgcttgaataaagataatgtttctttttacggatgtttgaagcagccaaacgatcatacaagtctttaacgctatagcggcgatggcgataaatgtaataaatctttgaactcttcttgatcatgccaagtccatctaaaccgatcttctttaaaatccaaaacattcttggagaagaaaaccaagaatcgaataagacgtatttagcttctactcctaatcgtaaggcttgtctaatcaactctacagttacatcattcatctttctctgagcttgatttctccttttaccagaaattgaacgttcatcagcagtaatgggagcagctccaatcatatttttcttggttttggttgacatcaaggcaaagttaaccggcaagaaggtattgccatcgctccagcctaaagttaaaccacgatatccgttcaaatactcatgcttgtcatggtcatagactttagctagcaattcggtctttttagaaaaagaccgagccatcagcgtatcgtcaacgataaaagcaagtcggcgtcttttatcgataaatggttttaagcagccaatgagccgggctgcaatcaagcataatagtttttgccagttgattcttccatcgttaagtacattgcgagcagttctaacggaaaaacgtttgtcatccttagctctgaataaagaaagccgagcaaaatgtactgacatcagccaagagataatcatggttaatgaaacggtggatttacgcttaaaattgacttgtttagttaacttagctagaccaattagattaataaatgaagaaattaaggatttagtatcattttctgtgtcgatttgttctatactgttcattgcgcaggatctcctttactttttaggtcgacacttaaagtataacgcagagagatcctgcgtttttatttttgataagaaaaagccaagaggcgcggggaaggagcgttaatcttagctttcaagtttcagtactataattaaactaaaaaaggagggctaaattatgccatttgtacatattgaattaattaaaggtcgctcagatgagcagattactaacttaatgaaggatgttactgaagcagtgcacaagaatactggtgcgcctaaggaacacattcatgtaattatcaacgaattaggtaagcatacttatggccaaggcggcgagtggagagcttaataattagaaattgtagtaaaaggcgactcgattgtgagtcgcctttttatatagttaaatatataaacttgtattagagccttaaagctatgtgtgcataaatgaattatttatttagaatcccacgtaatataatgatgttgatgtctagatatttacgaggaggatttgaaatgaatttaaaaaagaaaattgcaatttctgcaactgcactgactgttgctctctctactgcatttccaattgctgctgcgcaaagtcagccggtaaaagcagtaggtattgtattggttcatcgtgttacagcaggtgaaaatttcgctaattggttcaattggcttagaactcgataaatagaaaaattaggaagcaggcaatataaagattgtctgctttttgcgtaaaaaaatttaatcactaaaacgatcaatcaattaacactacttcataaaaatcagtataattatgttcgttactattagtaagttatacaataaaagtggtgagaataatgtatgattatcgaaataatatcaaaataattttaaataaaactgaggctgatgataaaagtctcgaaaatagtttaagtgcgattaaagctatcctaaatatggccgaagataatacagctgaaaaatctgagactaaatcagtaactcaacctaagaataaaattgcaaatacacaatcaattgcacaaagaaatgcagatttaaagcaaattaagcaattattgattgggctgacagccttaattgagactccaggtgatgaaaaagctaaaaagagttcacttgatgctttacacaagttgacgtttgttccaggcgttggcaagcgctatggcaatgttttgggtaaattggatcaggcaattcaaaaatctaagacaactaaagaagctgttaacaagaaaatttttgaagaagcaatgaagcccaaagagcaacctaagcgcgattatcgtaaaggacgccgctatactgttattcgggctttatcaggctgtaatttgattaatgatagtggtcaaattgtttaccgtattaaagaatcacaaattcactctttgaatttaaagagcggtgacatagttgaagctattgaaaatcgagataatccaaattatgaagcagaagtcttgcgcgtggtgggttatcgcaaattgcgcatgcgtgattatgacccaatcgaagaattccggtatgctgtggtccgcggcaaggccaatcaattagctatcactagaaatattaagggcgaaaagttgagaattcgcggtaaggatatcacgattccggttgattcaagttattatcaaggtgaaaatattcatgttgaagatggttcaattgtagatctagcttggtatacgggtgatgttcgcattaagaaaaatcctgctgaggcagtacagattcgttggatttatcaagttgatccgcctaagaaatcagatctgtcgtatcaaaagaaaaataagtcaaagaaagaagaaacagaagagttaactaaactcgacatgaatttgcactatcagcgggtgggaattgcgattggtgataatcaaaatgaaggaatattagaagggattgtttcgcgctataatgggatcccaattccaatagatgcttttgaaggcaagaagaaggtaatggaacggcaaatcaaagacttagatattgtaatcttgatgacagcttatgctgctcatgatgctacttggaatattcaggaattcgcttcaaagtatggtgttaaatttgccgtttcttcatctaaaggctaccgctcttttgagcgagcattatatcgagctgaaaatggtttacctgcttatgaaggaacgcaatcaatcgattataaagaagttaaaaataaataatttgttaacattattttgtttgcttgagctaacagatgatttttcgttaaaatagtactaactaaaagaaaggacgcttaataatgaaaaacattaaacaacgttcctggatgagatggttggtatttttagcaggacttgaaataatcgcaatatcaatcaatcttttttatggaccgattaatattgcagctggtggctcaacgggtatttctattctagtcgatgcggtctgggggattaatcgatcaattacagtatttgtagtgaatggcttgatgctgattttggcggcaatctttttaggcaaaaagactacccaaaatattgcattaggtagtttgctcttaccagttttgatggaagttacgcctagctttaaagcagtgaataatgacctactagccgtaatttatggtggtgcattaatgggacttggagtttcgctactttatcgcgttaatgcctcaagtggtgggacaacaattccgccgatgattctgaagaaatatttttatttaaatcctgcaactacgcttttatgcattgatatggtaattattttcttgaacatttttgtcgatggttggaatgctttcttcttagcagcattttctcaagtggtaactgccattacgatgcgctacgcggagaccggttttgataaaaagtatcaagtcagaattatgagtaattcagatttagaccgaattcaagatatgcttaaagaagattatcaaggcctgacgatttatgatgttataggtggatatagcgacgaaagcaagcgtcaattattaatcgtagttgatccacgtgaatatgggccacttatttctaaagtacatgagatcgatcaggatgcgtttatcattaccgaaaatgttgcaaaagtgcatggcggtcaatggcgaatgtaaaaaaataattgatcttagtctaaaagcgttgtatgatataagagttgtatttgtggagacctccacatctgcaaccgcacggcttgaggttagaagtcttcttatgtaagaagcaccccagttcggcgagtctaagtatttttttcggaggtgtacaaatgtacgcaattattaagaccggtggtaagcaatacaaagttgcagaaggcgatagcgtatttgtagaaaagcttgatgctgaagaaggtagctcagtaacttttgacgaagttatccttgttgctaatggcgacgacgttaaggttggtactccattagtagatggtgctaaggtaactgctaaagttgaaaagcaaggcaaggaaaagaaagttgtaactttcaagtacaagcctaagaagcactcacacagcaagtatggtcaccgtcaaccttacactaaggttacagttgaaaagattgaagcttaattcagaggtgaaatgaatatgaacattttaggtatgaaattatacgctcaccacaagggtggtggttctactgccaacggtcgtaactcagctggtcgtcgtttaggcgccaaggctggtgacggtcaaactattcacgcaggtactattatttaccgtcaacgtggtactaaggttcacccaggcaagaacgtaggtcaaggtggagacgacactttatttgcacttgttaacggcgttgttaaatttgaacgtcttggcaagtacaagaagcaagtttctgtatacccagctgaagaagctaagtaattcagagattaacatgaaaaggcgagtagcataagccacccgtctttttttatggctttttccgcccagaaacatgtataattaaaccaatatcatacaaaaagagggtctctgagatggaaaataggcaagaattattatccttaattaaccagcgaattgagcatgtaactgatttaattaaagaagcaaatgcagatgcattgattatttttaatcaagctaattatcgatatctaaccaattttacaggggaagaagcacaattaattttgactgctagtggcgaacgagtacttttatcagattctcgttttgctggacagattaaagcacaagcacctggcgaaatggatgttgtaatgaaacattctagtgattatgaagaacttactaaggccttgaaaaaaatggacgtcaagagggtcttagttgaaggtgaattcgtttcagcgagtgaatatgaaaaacttaagcaactaaatccagaacttgaatttgtgatggttgaagaattggttgaacgagtacgtaatattaaagatgatcttgaaattgcggcattgcgcaaagcaattgatatttcaatggaaagctttaaaggtattttgccgatgattaagcctggcgttaaagaacgtgcaattggtgctaaattggactacctatttaaagttaatggcggcgatggccctgatttcgatacaattgtagcttccggtgtgcgttcggcttgggctcatggcgttgctagtgacaaagaattgtccgaaggcgatatgattgtcattgactttggtagtttttatcacggttatgcggcagatattactagaactgtttcattaggtgaagttgatgctgaaatgcataaaatctatgatattgtacatgaagcacaacgccgtggcattgccgcggcagttgcaggtaatactggatatgatgttgataaagcagcacgtgattatattacagaacaaggttacggtcagtattttggacacgggatcggtcacggcattggtcttgaaattcacgaattgtgtcaaccagctttaccttttagaactactaaattggtcaataatatggttcataccgtagaaccaggaatctacttgccagacaagggcggtgttagaatcgaagacgatattttggtccatgatcaaacgcctgaaactttatccactttgccaaaggatgaattgatttccctataatagctatttaatttatcgtatttatggtaaaaacgcttcaagattggtaagataataattgtagaaatgagggacttaatatgacaatgatttcagtaaacgaattcaagaatggcttgactattcaatacaacaacgatttatggcgcattgttgaattccaacacgtaaaaccaggtaagggtagtgcctttgtacgttcaaagcttaagagtttgagaactggtgctgtacaagaatatactttccgttcaactgctaaggttgaaactgcagacattcaaactaagtcaatgcaatacttgtacaatgatggctcaagttatgtattcatggatacttctacttacgatcaattagcaattccaaatgaacaaattggcgatgaagctaattacttattggaaaacatgattgttaacgtagttatgcacgaaggtgaaactttaggtatccaattgcctaatacggttgatttgaaggttgctaagactgaacctaacatcaagggtgatacttcatcaggtggtggtaagccagctactatggaaactggtttagtagttaacgtaccattcttcattaacgaaggtgacgttttaactattaacactgctgatggtacttacgtatcacgtgcaaataagtagtttatttgaggtaacaaaatggcagatagttcaaaaattcttttaagtggtgaagaaaacagcgagcaaattaaaattgatccaagtgttctagaagttattttgggtattgctgcagaaaaagttgatggtgttgccggaatgcgcggcagtttgaaatcaggcttaaactgggttttcggtcgtgaagatcatggtaagggcgtaaatattagtgttgatgacgataataagctaattgctgatatttatgtttatcttgaaagcggcgttaacgttcctaaggttgcaatgacgttgcaaaagaagttgaaggcacaattattgcaaatgactgatcttgagctgaaggcaatcaacgttcatgttgtcggtttagttttcccagaagatgaaaatactgaccagactacatcagagctgtttccggaggacgaagaagaaaaataatgaaccaacacgaaagtcgaaaagttgctatgcaagccgtttatttggctaatcaggagccagatttaactgccgaagaagttgaagcaaaagtcgttgcaacgcttaatttaaaacagctttctgcctattctaagaagttaatcgaaggcgtactagaagatcgcaaaaatttacagtctgaactaactagtcatttgaaaaagggctggcgtcttgaacgtgtgagtcaaactgtggtagccatcatggaagttgctttatttgaaatcaagcatagcgatgaaattgatgctaaggcagcagttaacgaagctttaaatttatgtgacgaatttgctgagcctaaagaaaagccatttattaatggaatgttagcaaactttgttaaatagcgatgaatagccggcagttttgccagttatttttttacaaaaggagaacgggctttatgggaaagattcttgatggtaaagcatttgcaaatgaattagggcaaaatcttaaagaaaaagttaagaaattaaaagaagagggaataacgccacatttttgcgtaataaatattggggatgatcctgctagcaagatttatgttcgaacaaaaaagcggcgggctgaaaagatgggaattatccaagatatttatcaaatgcccgctgatactaaacaggaagaagttttagcattaattgataagctaaatgctgatcctgagattaacggcttgatggtacagttgccagcacctgaacagattgatgcagatgccttgttaaaaaggattgaccctaataaggatgtcgacgccttaacgcctgcgaatattggtcaactttggatggaaaatcactttgttgaaccggctactgcagaaggcattattgctttattgaaacattatcaaattacgctggctggtaagagagttgtagttattggtcgaagcaatatcgtaggcaaaccagtagcggcattaatgttagaggaaaatgctactgttactgtttgccatttgtatactaaaaatctggctgaaattacacgacaagccgatatagtagtttcagcaacaggacaagcatttttggtaactgcagatatggttaaagatggggcagtggtcgttgatgtgggcatgaatcatgttaatggcaaattagtcggagacgttgactttgataatgttaaagaaaaagccagctatattactccggttcctggcggtgtaggtcctcttacagtacaattcttaatggaagcagttgttaaattgactaggagacaaaatggccgagaataaatatttaacggttactgatttaaattattatattacgcaaaaatttaagaatgatccttacctgcataaggtcttcttacaaggtgaattgtccaacttccgttatcggcgtaattcgcaccagtatttttcactaaaagatgaaaaatctaaaattaatgtggtgatgttccgttccttctttgataaggtgaaatttaaaccagaagaaggaatgaaggtttatgtggttgggtatgtcagcgtgtatggcccacagggctcgtatcagttttatgctgaacaaatggaaccggcaggattaggtgccttatatgagcaattgaagcagttgcaggccaaattagccaaagaaggtctgtttgatccagagcataagaagaagttgcctcattttcctgatcgaattgcagtagttactagtgcttctggggcagttattcacgatattatggttacagctaatcggcgtttcccgcatgctgagattgatttgtatcctgcgcaagtccagggtgatactgcagcggattcattagtgagagcaatgcgccagattgccgctcaaggcgacaagtatgatgtcatgatcatcggtcgtggtggtggctcactagaagatttgtggccattcaatgaagaagaggttgtgcggcaagtttacgcaatgcagatgccagtaatttcttcagttggtcatgaaacggatactaccttgtgtgatttggtggccgatgcgcgtgcagcaacaccaactgctgcagcagaatatgctacgcctaatacattggacgaaattgcgcatattaagcaattaaccagccagttggtagctagcatgcaaaatattattcgttcgaaacgtgagcgcttaagtcgggtgcagaattctgtcatcctgcgcgagccgactagactgtatgatcagcagattcaacaagttgatcaattaaaacaaaggctgcaaaatagtatgcaaaatcggttgacccattctgtccaaggttatcaactgttgaagcagcgtttgtttagcgttagtccagataagagaatcggccagatgcagcaacaagagcattttttacagcaacgactgattgataatatgcagcactatttgaaaaataaacgcaatagttttacccaagtaatgcagcagttggatgactatagccctttgaagacgctagagcgaggttttgtttattcaactgatgaacaagggaaaaccattagttctgtgaaacaagttcaaaaggatgatcatttgcgattgcattttaaagatggacaagttgaagcagtggttacaaaggtaaaggaagaacaaaatggcagtgaagaaaaataattttgaagaacaattaactaatttggaacaaatcgtgcaaaatttggaaaacggaaatgttccgttggaagatgccctaaaagaatttcaggagggcgtaaagattagccgtgatttagaaaagaagcttaacagtgctgaagaaactgtggctaagttgattgatagtgatggcacagaacacaaattagatccaaataacgcatcagcaccagaggaataaatatgacagcatttacttattttaaagatgaatggaccccagtaattgatgattatctggctaagcatttggctagtgaggttgaagatcaaaagatcagtcagattatggcctactcagtgatgggtggcggcaagcgcttgcgtccgttattgtttttagctacgttaaatgctttaggcagaaagattgaagaacctgaaattaggattgcctgcgggattgaactgattcacacttattccttgattcatgatgacctgcctgccatggataacgatgactatcggcgcggtaagctgactagccacaaaaaatggggcgaggctgaggcaattttagctggggatgcgctcttgccgatgggaattcaatggattgcggaaggcagtaagtcggcgaaattggtagatttaattaccaaagcagttggccctaatgggatggttggcggtcaatatttggatattgattcaactaacaatgctagtgttgcgggtgatgccaagtttatcaataagatggaatggctgaagaccggttgcttaattcaggctagcgttgagatggctgcagtttatgcaggagctagtgatattgaacaggtaaaattagtcgattttgccaaaatttttggtcgttcataccaaatctatgacgacttggttgatgtcgttgaaactagtgcagaagctggtaaagctacgcacaaggatgaagctgaaggaaagaataatactttaactttgttaggaattgatcaaagtcgcaaagaactaactgacttaattaagcaagcacaagatgatttgcatggactaaatggcgaagtgctaactggctttttagatctttatcaaaaggtgttataaatggcaaaacaaagagcagatattttattagcagaacaaggaatttttcattctcgttcagctgcccaaagagcgattatggcggggctggtttctgatcacaatcatcaacgaattgataagagcgggactaagtttcctgaaggggaaaagttttacgtgaaagatgatggtaagaaatatgtttcgcgtggcggctttaaactggaaaaagctcttaaggtctttgacattgatttaacaaataaaatttgtttagatattggtgcatcaactggcggttttactgatgttgctttacaaaacggtgctcagatggtctatgccttggatgttggctacaaccagttagcttggcaattgcgggacgacccgcgtgtagtggtgatggaaaagcagaatttccgctattcgaagccggaagattttgatcaaggactgccagattttgcaatgaccgatgtgtcctttatctcgttagatttgatcatggcaccgatgtatgcaattttgaagaatcaatgtgatgccgtttgtttgattaaaccacaatttgaagctggccctgagaatgtcggtaaacacggtattgttcatgatcatgaagtgcacaaggcggtaatcgagcacaccatgcaaaaggcattggagatcggcttcaatgttttaggcgttgattattcaccaattaaaggtggcaaaggcaatattgaattcttgattcatttacaaaaagacgaagcaaatggtggccgcaacttatggcaagggagcccagctgaagtggttgagcgcgccgtaagtggtctataggagtgaagctatgctagttgagctagatatcaaaaactttgcaattattaaaagcttaaaggttcgttttcaagaaaaaatgacggtaatcatcggtgaaactggtgctggtaagtcaattattattgatgctgtttcattactgatgggtggtcgcggtcaaaaagaaatgattcgttcgggtgagtccaaggcgattattactggcttgtttgaattggatgatcaaaaagaaaagatcgcggaattgtgtgatcaatatggtttgccgcacgatgacgatcagctggtgattagtcgtgaattagctgtcaagggcagaaatgtagtccggattaacgggcaattgacgacgattaatgttttgcgcgagattggtagctatttggttgatattcacggccagcatgatcagcaaattttgatggatcaggaccggcagattgacctagttgataattatgcccctgcttcttttaaggcagatttagccacttatcaaactgattatgctcaatggcaaaagctaaccagtcaattgctgcacctgcgtcaagatgcccaagaattagctcagaagcaagatattctgcagtttcagaataatgaattggaagcagccgaccttgaggatccacaagaagatgagaaacttgaggaagaatataacgaactaaataattatcaaaaaattgcggatacggcgaattacttcatgcaattgtatgatgacgatgagcatggaattgcaactttacttggagatgcgcaaaatgctgcgactgatttaactgaatttggttcaaaatttaaggattttgctaagacagttgatgatggagtttatgctttaaatgacgcccgcagtgaattatcgaacttaatggatgcaatggacttcgatgaggaacgttttcaatacgtgactaaccgcttggataccttgaattcattgaaaaagaagtatggcccaaccttggctgatgtgtttgctttttatcaaaaagtacaaaaagaactcagtcaatttgaaacaggcggccttgatgaggaaaaattgcaagcagaagttgccaagattgaagaaagaatgacccaagaagctagagatctgcatttaatacgcgaaaaagtggctcattctctggaagagcagattaagcaagagttagctgatctctacatggaaaaagctcgcttttctattaattttgatgaaacaaagacatttaccgataagggaactgatgcgattgttttcttaattgcacctaatccaggtgaagatttaatgccattagttaaaattgtttctggtggtgaacaatcaagattgatcttagctttgaaggcaatcttcagccgagttgaaccagtgggtaccatgatttttgacgaaattgatacgggagtttctggccgagtatcggctgctatcgggaaaaagatgcactcaatcggtcgcaacaagcaggtaattgcaattacgcactcaccacaagtggctgccgcgggtgatcaacgctacttggtagctaagcaagtaaaagatggttcaacctttactcaaataggcccacttagcaaggaagaaaccattacagcgattgcacagatgatggctggacaagatgtaaccgatgcagcaaagaagaatgctgcagatttgattaagagtattaaagatgactagtattagtaaattttggcgtgatttttgtgtagaacatcaagtaagtcctacagcattagaaggtgcttttgcttttggagctaatagccgggatgcagatattcttagtgatttggtcaaaagtggaattaagacggcaacgactagcctgtattctgcgcaagaagatgtaccggttgtagggatgtacgcaattgttttaaatggacgaaatgaaccagtttgtgtgattcaaaataagactgttgagattatgccatttaaaaatgtctcagctgagcatgcctatttagaaggcgagggcgatcgctcatatgaatcttggcgtaaagtacacgagaaattttttgcgcgcgaatgtcaagaactgggacgagagttcacagatgaaactgaagtagtgtgtgagacattcgagaaaataatttagtaaaggagcagacgattttgtctgtttttttgtatgcaaagagaaaacttgaaaaagaaacaattttagtgcaaactagatatattacaagttaagaggagttcagcatggcagataaaggtttattacttgtgctttctggtccttccggcgttggtaaaggaactgttaaaagcgcgattgttgaaaacaaagtctttccatttgaatattcagtttcaatgactacgcgtcaaccgcgaccaggtgaggttaatggccaagattatttttttgttagtgaagatcgctttcaagaggctattaaaaatggtgagttgttagaatataataaatatgtcggtcactattatggtacacctcttgcaccagtgaagaagatgcttcatgatggcaaagatgttttacttgagattgatgttaatggggcacaaaaagtacgtgaaaagatgcccgatggcgtgtttatctttttaaccccaccagatctacatacgttacatttgcgtttggaacaccgtggcaccgagtcagaagatgtaattcgtggtcgaattaagcaagcgcgcaatgaaattttggagatggaagactatgattatgcagtagttaatgatacagtagctaatgcagttgatcatattaaagcgatcgtcgatgcagaacatgtcagtgttaaacgtgtaattgatgactatcgtaagatggtcaaggaggattaattattatgagaattacttacccatcaattgataaattattgtcacgtgttgattcacgctattcattatctgttcttgccgctaagagagcacatgaacttgaagctggtgatccaccaactttggaacattttaagtgtgataaggctgttggtaaggcacttgaagaaattgctgctggtaaagttactgttgacccagctcatgccgaggttaacctcgaagattaatttattgaccttcatcctttggggtgaaggtcttttttacaggtgattaaatgattgctcaggttattgttgatgtagctgcacggcaaacagaccgtatttttgaatatcatattccaacagaattagaaaaggatattgcgattggatcaagagtagttgttccgtttggtcctcgtaaagtgcaaggttttgtggtggggatcactgatcaaagtgaatttaaaggtaaacttaaggatttgctagttgtggtagatgagatgccaccgcttacgccagagttggtaaagttatctgctgatttagcaaaaaatattttttcttaccgaattaaaattttacaagcgatgctaccttgggtaatgcgagcaaattatcgcaaattgctagtgccagctaatgatagagctgccaaaatgccgctgtttcagggtgatccaattgatttaaataaaattacggatctggcggagattaagcaattccgcaaattattgcaagatgatcaagcaaagattgagtatgtggtagaaaatcgagccaagaagaaaaaagaaaatcaatatgaactagcattaaaaaaagaggaatatcccaaaatttacaatactttacgtcaaaatgcggtaaagcaaaaaaagttattgatggatatcattgataatgcagcggattatcccaaaagccaaagccagctagaaaaacagcttggattgacggcggcgagtttgaattctgcgattaccaaaggttggttgaataaaaaaagtgttgaggtttatcgcgatccgttatccggatttgatgacggagaacataaaacagcggttaccttaaatggtgagcagcaaggtgctttgaaccagatcacccaagcaattgaacagcgccaggctgagacttttttgttggaagggattactggtagcgggaagactgaagtgtatttacacgctattagcaaggctcttaaacaggggcgaaatgcattaatgctggtgccagaaatttccttgacgccgcaaatggttcgtcaggttaaggcacgttttggtcaagaggtagccgttttacatagtgccctatctgagggagaaaaatatgatgagtggcgccgaattcgtcgtggcgagactaaggtggtcgttggcgctcggagtgcagtttttgctccactagataatattggtttaatcgtgatcgatgaggaacatgagtcttcatataagcaagaaaccgatccacgttataatgcacgtgatgtggctatttggcgtagtaaatttcataattgtccgttggttttaggaagtgcaacaccatcgttgagtagccgtgcacgcgcccaaaaaaatgtctatcatcttttacggttaactgaaagggctaatcaaaagaaattgcctaaagttaatttgattgatctaaagcacgtgcagtttgctggtggtcaatttgatttatctgttgagctagtagatgcaataaaaaagcgtttggcaaaaaaagagcaggttattttaatgctcaatcgacgtggttttgctaattttatgctttgccgtgaatgtggttttgtattaaaatgtcctaattgtgatgtttctttaaatttgcataaggatactaacagtatgcaatgtcactattgtggtcatactgagccagtacccacacgttgtcctaattgccaaagctcgcaaattcgttttttaggtgcaggtacacagaaggtacaagaagaattagaagagcttctgcctggtgcacgaatcttgcggatggacgttgatacaactagaagaaagggtagctataagaaaattctagatgcctttggtgctcatgaagctgatattttgttaggtacgcaaatgattgctaaaggattagatttccctaatgtaactttagttggagtaatcaatgccgatacaggattatggctttctgactataatgcttctgaaaagacttttgaattattaactcaagtagctggccgtgcaggtcgtgctgataaggaaggggaagtcttaattcaaacttataatccagagcattatgctattcaactagctcaaactcaggactacgaacgattttatggctatgagatgaatatgcggcatgctggtaactatccaccatatttttataccgtgctgatttccattgctgctaaaaaagaacagaatgcagctcgtgaggcttttaggattaagaggtatttgaatgagcacttgcatgagccaacgattattttgggaccaacgccaagtgcaatttctcgtgtaaaaaataaatattattatcaaatactggtaaaatataaaaaagaaccaaatttaaatgaattattacaccatgttcaagattccgcgcaggaagctaagaaatatggtttaagtatttttattgataatgaaccagagagaattatgtaaggggatgctttaatgacatcaataatatttatgggaacaccgaaattttcagttccagtacttgaagggttaattgatgaaggctatgagattaaagccgtggtcactcaacctgataaaaaggtaggacgtaagcagaaaattactaagtcaccagccaagatcgcagcagaaaagcatgatttgccaatctttcaaccggttaagttgtctggatcagacgaaatgcagaaattaattgatatgcatgcagatttgattgtaactgcagcatatgggcaatttttaccaactaagtttttgaattcggttaaaattgcggcagttaatgttcacggctcacttttgcctaaataccgtggcggtgcaccaattcaatattcactaattaacggtgataaagaaactggaattaccattatggaaatggttaagaagatggatgctggtgatatttatgctcaagaagcaattaagattgagcctgatgataacgctggcactttatttagtaaattatcaattgttgggcgggacttattgcttaagactttaccagcaattattgatggctcaattaaaaaggttccacaggatccagaaaaggtcgtcttttcacctaacatcactaaagaacaagaaaagcttaatgttgatatgacagcagaagaggccaacgatatgattcgtgctttgaatccagatcctggtgcttatttgatgattgaaggcaaacgtttcaagatctggaaggcagaaattgcatctgattcatcaagtttaaatgccggctctgttgttgctaacaaaggacgttttgccattagttttgctgataattcagtacttaacttacttgaagttcaaccaagtggcaaaaagagaatggacatcaagagctttttaaatggtcaaggtagtaagtttgtcccaggtgaagaaattgtcgatcgataagagtgcacgtgcagtcagcttagagacattgatcaaggtcttagatcaaggctcctattctaatattagtttgaataacagcttaaagcactctaacttgtcaattgcagaccaaaatttagctactaatattgtttatggcacgattcagtatcgattgtttttagaatatcagttaaaaggcttagttaggacaaaactgaccgaaaaatatattaagccattattgttaatgtcactttaccagttgatttttttggataaagtgcctgatcgtgctgtacttgatgaggctaataaacttgctaagcaatatggcaagcgacattcagctggctttcggttggtaaatgggattttgcgttcgtttactaggcgcggggtgattttaccagctgaaaataatccagttaaatatttaagtgtcaaagagagcgtacctgaatggttagttcaatatttaattgataactggggcctagacaaggcaaaatcagttttaaacagtattaatgagccagctaaaaacagtgtacgtatttcaaagttggcagataaagagcaagtttttgcccagttagagcgggataactatcaaccacaatggtctaagttatcaagcgatgatgtgattttgagtcacggtggcattagcgaaagtgatttgtttgaagaaggcaagttaacaattcaagatgaagctgccagtttagtcgtagaagcttttgactttgaacaagatgagcatgtgcttgatgcttgttctgctcccggtgggaaaaccgtgcaaattgccgaaagcattgttaatggtgatgtgactgccttagatattcatgataaaaaattacgtttagtacgagataatgcccagagaatgcacgttgcaaataaggtaaagactaaggcatgtgatgcacgtaaggctacagagatttttgcggcaggtgaatttacaaaaattttagtcgatgccccttgttctgggcttggattattgcgtcgtaagcctgaaattcgctatactaagagacaacaggacttacaaaatttacaaaaaattcaattggcaatcttaactgcagtaagttcactcttaaaaaagaatggcgagttggtttattcaacttgctcaatttcaatggaagaaaatgaagaggtagttaagaagtttttgcaagcacatcctgactttgaactagttccatttaagttaactaaacttgaatcaaagacagggatgttgaaaataatgcctgatctagatggcaatgatggatttttcattgctaaatttaagttacgaggttagatttttgattgaaacagcatacgcttcgagtattggtaaggtacggaaaagcaatcaagattttgtaaaagtttttaaaaatcaaaagggaattgtcttagcaattgtctgtgatggtatgggcggccatcaaggtggtgacgttgcttcaacaatggcagtcacccatttaggacataattttagtatgactgactttgcagatgctaatctcgctcataaatggcttgatgtgcaattaaattctgaaaatgaaacaattttaaagactgctgataagtttcctgacttaaatggaatggggacaacgattgtattggcgtttgcatttgataaaaatgccttaattgctcatttaggtgattctcgggcttatagttattctgaaggtaaatttgtccaattaactgaagatcattctttggttaacgaattagttaagatgggtcagattactaaagaacaagctaaacaccatccccagaaaaatattattacgcaagcattaggcgtctcaagtacgattgatcctgaatttgatgagatcaagatgggggaaaacgacattattttgctctgtactgatggcctaaccaattcacttagcgatccacaaatccaacaaattttggcaactaaggagcttagcttaagagaacgttgtaataaattgattagtgaggccaatcgattaggtggtggtgataatattactgtctgcttaatttggaacaaggaggacgagagcagtgatcgataaaggttatctgcttggggaacgttaccgcatcatcgataccttaggtgaaggcggaatggccaatgtctatctagcggaagatattatcctgcaacgtaaggtggcagttaaaattttacgccttgatttgcagaatgaaccgcaaacccaagctcgttttcaaagagaggcattagctacaagtgaattaagtcatcctaatattgtttctgtacttgatgtaggtaccgatcatggtttgccatacatggtaatggagtatgttgatggtcctaatctaaaagaatatattcaaaaaaattcacctttggatttaaatgaaattattcgaattatggatcagatattgagtgcagttgcattagctcataagcacaatgttattcatcgtgatctaaaaccacagaatattttgatggataagcgcggcaatattaaaatagctgatttcggaattgccgttgctttgaatcaaagctcgattacacaaactaattcagtaatgggttcagttcattatatgtctcctgagcaaacgcgtggcggaatggttactaaacaatctgacatctattccttgggaataattttatatgaattgatcacaggaactgttccgtttaacggtgatacaccagtggcaattgcactgaagcatgcgcaagaaccaattccttcaattcgcaagaaagattcaagtgtaccacaggcgctggaaaatgttgttttaaaggcaaccgcgaaagatccacgagatagatatgctacagctcaggaaatgaaagcagatttggatagtagcttggatcctgaacgggcagatgaaccggtttttgtaccatatcatggtaataacgatgataaaacaattgtattgcctggatttaagccacaaaaggaagaaaaagaagtggtggagccagcaaaaaccgaatcagtagaatcaagcaagctagtaaagaaaaagacttttttacagaatgtcaaaagtcacaaatggtggtggctgatctcaattattgccgcgggtttaatcatttttatgatgattttcgctttaagtggtactggaaataaacgacaggatgttaatattcctgatgtaactaatattgcagaaaaagcagctgagagtaaacttgaagcagcaggcttacaggttggaaaaattattaggcgacaatcagatgatataaaaaaaggccgggttattgcgacaaaaccaactgcaggcaatagtctagagcggggaaagagcgttgatttaattgtttccagcggttctagcatggttaaagttcctgatatggttgggaagaactatgccgaagcggcagaaaaattagaaaatatgggctttaatgtagttagagaggaccaatattctaataaagttgacgaaaatcaagttatttctcaaagcattgctgcaggtgtagaggttaagccgacgcagactacaattacgttgatagtttcacgtggcaagcaggctagatcacattcaaatatggttaccttgaaagacttaagtaattattctttgaagagtgctcaagactatgccaaagaacatggcctgactttacaaatcaatcaagaatattctgatgatgttgagaagggcttagtaatttcgatggagccaggtccgggtactaaggttgagcgtggttcaactgttaccatcaagatctcgaaaggtccaaaggaagacaaggaaactactgtaactaagacctttaccgttaactatgttggtgatgatctttctaagagtgagaagcctgataatgataaaggaagcaataactctgagtcagaatccgttaatggcaagggtgatcatgtccagatctatattaaggatgatgatcattccttgaacaatatttatcgtgacttgtatattaagcatgatatgagtttctcgattccatttaacattagagaaggtagtggacaattaaaggttgttcgcaatggcgatacagttttgaatgaaaaggtgactaaataaatgaaactagcgcaaggaaccgtcgttggtttgattgctggttattatgatgtagaaaccgctgcgggtatcgtgagaacgcgtgctcgcggcgtttttcgtcaaaaaaagcaaaaaccggcagttggcgatcatgtggaaattcagatagatgataaaggaatgagctatctggtgaaaatcttgccgcggattaatcgaattgggcgaccagcagttgctaatgtaagtcatgttttgttagtaatttctgcagtagaaccggatttttctgtagagctgttagatcgttttttgactttcttttcttggcaaaaagttggtgtaacaatttacttgtctaaagcagatttgctatcagaagcaaagttaaacacaatcaagcaagctttagcatattatcaaaaaataggttatcttgttttcactgattatcatgaaatgcaaattcagattcctaaaatgatcgaaaaaaatcaaatttggactttagcaggacagtcaggtgctggtaagtcaactttgcttaaccatttaaaaaaagatgctaatcaagcgactggtgcgatatcaactagcttgaatcgtgggaaacatactactagaaaggtcgaactttttaagttaggcgcgggctttttagcagatacgccaggtttttcgtcaattgatttgacaccaatcaagttgaatgagttatgtaattactttgttgagtttaaaaaggcaagtattcactgtaagttccgcggatgtcagcatttgcaggagccaggctgtgaagtaaagaagttacttgaagccagagaaattctggaaagtagatatgaggattatttggctatgcggactgagattagcgaaggtcgcataccggaatatttaaaatagaggtaatagctgatgatgattgcaccctcaattttgaacgcaaataatattgatcttaaaaatgatattgaaaatgcagtccaggccggaattagccgttttcatattgatattatggatggacattttgtgcctaatttatcttttggaccgcaactaatcaaagatttcaagcgtgaatttccgatgacagatgctgaaattcacttaatgagtgatgccccagataagttggtaccagcttttgttagtgcaggagcagatttggtcgaactacactatgaagcaatggacaagcctaagttatattattggttcgattatttagcttctaatggcgttgatgctgctttggcaattagtccagatacaccagttgaagtggttgaaccgtatttgccattactgaaacaagtattagtaatgacggtcaagccgggatttggtggacagagttttcttcctgaatcagttaatcgaattaagtcagttagagagattgtcggctctgattttgatattgaggtcgacggcggtattaatgatcagactattaaattagctgaaaatgctggcgctaatatatttgttgttggttcatacttgtatgaaaatggtgatgttggcagtcaagtacataaattagaaaagattattaagtaatgaaagcatatgcattgttgggcggtccaactgaattgtggcctgaagatattgaagaaaagctggctcaagctgatttagttattggggttgatcgtggtgccttgtttttagaagaactgggaataatacctgatgtggcagtaggtgactttgattctttacacgaaaatgacttaagccaaatagaaagtaatgttcaagacattcgttattctaatcctgtcaaggattggactgattctgagctaatgttgcagattgcttttgaagattatcatgtggatgaattagtgatttttggtgctacaggtggaagattggatcattttttgatcaatctattaatgttgctaaatcctgaaatgagattatatgcgaaaaaagtaacgttgattgaccaacaaaatctaatttgcttttttaatgcaggcacgcatgttgttcaaaaaagaaaaaattattcttatattggttttgcagctttaaaagcaatcgaagattttaatattattggtgcaagatatgagttgaagcactattctgggaactatcctcgtgttttttcatcaaatgaatttttgcctaatagtaatgaattcaggattagcttgcaaaatggtatgattgcagcaatttattctaaagatattaatcgttttcatgatttataggttaaaatagaactatagaaaagaaacaagggaattcaaatgaaatatattgactttgaaaaagatattgctggtttcgaaaacggtcgctacgaagcaagacttgaccgtgcaaaataaaatgtagaagactacatgtacaagaaccacgttcacatttttgataaaaagaagaagaaggaagtagctactatcaatggcttagctagaaatgtaacttatcaagatttggacttgccaactaaggtgggtgaaatgattactgagtatgcatacacgccaattgatgaaagaatggccgacgaaattcctgatgacgataagcatcacaatattatgaagtaaagtaaaacggtaagaagacaaaataaaatggtcttcttaccgttttttatataaatcattaaaataagtaaaaaaataagcttgcaagatcagtgatctaacaagctcttggtctattaggcacgagtaactttaccagactttaaagccttggttgaaacccatacgcgctttggcttaccgtcaacaagaatgcgaactttttgaaggtttggcttccaagcacgacgagttgagttcaatgagtgtgaacgtttgttaccgaatgtagtcttcttacctgttacgtaatcttttgccatttgctaaacctcctttaattgtgatgtcatacttaattagattatcatatgttttcgcgcaattcaatactaaaaggattttttcaggtgtattttaattattgattatgtcgttactatgataaaataataaacgtatatatagataataagacggaggacgaaacatggctgttaagatcaagacaaaagatggtttgattgatatttcaaacggtgtaatcgcaactgttgttggtggcgcagctacgtctaactatggcgttgtaggtatggcatcaaagaatgccattcgcgatggatttgacgggattcttaatcgtgccaattataagcgcggtgttgttgtcaagtcagaagataacgaaattacggttgatgtgtacattattgttggttatggtttgaagatttctgaagtaagtaagaatgttcaagatagtgttaagttcaatttgaagaatcaattaggaatagacactaaggccgttaatgtcattgtacaaagcgttaaggtacttgacgaataacacaggcggaggttttaaatagtggttttaaatgagatagatagtaagcaatttagagatatggtacgtgttgccactcatcgaattggtaaaaatgcggagtttgttaactctttgaatgttttcccagttcctgatggtgatactggtactaatatgaacttaaccattgaaagtggtgctaaggctgtttcggaaaatccaagtactagtgttagtgatttaactgaaagcttggctaaaggtatgctaatgggtgcccgtggtaacagtggggttatcacttcacaattattccgtggcttttacaaggctacccaagggatgaagaccttaactgcacaggaattagcaaatgctttttcaaatggtgttgctactgcttataaggctgtaatgaagccagttgaaggtactattcttactgtagctcgtgttgctgcacaagccggtgctactaaggccaataacaccgacgatgtaactgaagtaatgaaagctgtagttgaaggtgctaagaaggctcttaagtcaactccagatttattgcctgttttgaagcaagttggtgtagttgactcaggtggtcaaggccttttgtttatctatgaaggctttttggaaggcttaatgggtgaaaactttgcagatcaatatcaacctgacgaaaatgaaatggatgaaatgatcaatgcaatgcaccaccaatcttcagttcaaagccaattggctactcaagatattaaaaatggttactgtactgaaatcatggttgatcttgatgccgatgtgccaaataaaaagaagtttgatttggaagaatttagaaagcacttgtctggcttgggcgattcattattagctgtttctgatggtgaaattgctaaggttcacgttcatactgaacaccctggtgatgttttccaatacggtagtcagtttggtcaattaggcaagatcaagattgataacatgagaatccaacacgaaagcatcgttgaccaagatgaagaacaacaagaagcagttgattttgcagtgatcgcagttgcttcaggtaacggtattcgtaagttgtttgaaagtgaaggggtaaaccgtattatctcgggtgggcaaacgatgaacccatcaactcaagactttattgatgcaatcaagaagtctggtgcgaagaaagctattgtcttgccaaacaacggtaatattgttatggctgctaagcaggctgctgaagttagtgatattccggttggtattgtaccaactaagactatttctcagggtttaaccgcaatgctttcattcaatccagatgcatctgttgatgaaaatgtggaagctatgacagaggacttagatacggttgtttcaggtgaagttactcaagctacccgtgatactgaaatcgatgaagtagaaattcataagaatgactacttgggaattgttgatggcaagattaaggttgacaatgctgatttaattaagactactgttgatatgattgaaaagatgctggatgaagattcagaaattatcacaattatgtttggccgtgatgctagtgaagagcaagcacaagaagtagttgaacaacttgaagccaaacatgatgatcttgaatttgaaattcatgatggtggtcaacctgtatatcacttcttagtatcagttgaataacaatgattgataatgcattatttgctcctgtcacagacttaaagggtgtagggacaaagactacagctgcattaggaagcttaggcatctatagtatttatgatttgcttttttactttccttttcgttatgacgaattacaaacattaccgttagatcaaatcatggatggtcaaaaagtaatgctaaagggaatagtagccactgaagcgtttgttagtcgttttggctataagaaaacgcgcttaagtttcaagatgagaattgaccatgatgtgatcatggtcaatttttttaatcagccgtggttaaaaaataaaattgagatcggacaagaagtagctatttatggtaaatacaatgttgcccggcaaagtttaacggcctttaaattcgtagcagccaaagaaaatgatagtggtatggcgccgatttatccggttaatcgacatgttaagcaaaaaaaattagtagatctaattaatgtggctattgacgattttattgatcaagtgcaggatattgtttcggaaaagttgcggcaagaatatcgtcttttaaaagaccaagtaattattgaaaaaatgcaccaccctaagaatagtcatgaggctgaactagctaagagaagtgcgatttttcgtgagttttttatttttgaattacaattagctttattgacccgtaatgatggtaaacaaatgggttatgcaaagaaatacgatctgacagaaattgctcaattaactaaatctctgccatttgaattatcagatgatcaaaagcatgtggttaatgaaatctttgctgatatgcattctgatggtcaaatgcggcgacttttgcagggtgatgttggttctggaaaaactgttgtagccgtttatgcgatttttgcagccattacagctggctatcaggcggctttgatggtgccaacagaaattctggcaactcagcatttcaaaaaaatcgatgaattgttgcgtcctttaggtgtgcgagtagctcttttaacaggcaatacaaaaacactggagcggtgtgagatctaccgtgaattaactgatggcacgattaatgtggtaattggcactcatgctttaattcaagatagtgttatctttaaaaaattaggtctagtcattattgatgagcagcaccgctttggtgtaggtcaaaggcaagctttgattaataaaggcgatcaaccagatattttggcaatgaccgctacgccaatcccgcggacgctggctttgacagtttatggtgatatgacagtctctgaaatacatcatttaccagccggaagaaagccaattatttccacatggaaaacaagtagtcaaatgaaggaagtctatcgacaaatgcaagagcagctaaatcaaggctttcagatttacgctgtgacaccattgattaccgagtcagagacgttagacttaaaaaatgcagaagaattgcatgaaaaattaagccatgattttcctaatcacaaggtagtcctgcttcatggtcaaatgccaggtgcgcaaaaagatgagattatgactgcatttgcagctggtgagatcgatattttagtaactaccagtgtgattgaagttggagttgatgtggctaatgccaatatgatggtgatttataatgctgatcgttttggcttaagtcaattgcaccaactgcgtggtcgaattggtcgaggacaaacacaaagttattgtgtctttctagctgatcctaagaccgattcaggtaaagcaagaatgaaaattattgcgtcgaccaatgacggcttcaaattagctgaagaagatttaaagatgcgcggtgaaggtgatttgtttggtaaggctcagtcaggattgccagaatttcgtgtgggtgatgtagtaaataactacaatacattggtcgttgcgcaaaaagaagcacgagctttggttgcggctgatcctgatttattagatccaggacataaggcacttaagcaagtgctagaatataagcaattagagcaaaacagaatttagaaaagattgtggtgaatatatgagaacaattgcaattgatgcgatgggtggcgaaaatgccccagatgcaatcgttaaggcggttttacaagctaaaactggaatgcctgagactaaatttttattatttggtgataaagaagcattaagaaaactaatccctgaagatcaaattaatgatcaattaggagttgtacctacaactgaagttattgctgatgaagatgaaccagttaaggcaatcagaaaaaagaaagactcttcaatggttgtggcagctaacttcgttaaggaaggaaaagctgatgcgttgctttccttaggcaatactggtgcattgcttgcttgtggaatttttattattggtcgaatcaaggggattgttcgtccaggtttgatgcctactttacctgttcaaaatagtgacgatggcttcaatatggttgatgttggtgctaatgctaagagtaagccagaatatcttttacaatgggccgaaatggcttcgtactatgctgagaagattcgcggcattaaaaatccgcgagtaatgctcttaaataatggagctgaaagcgacaagggtgatgatgttcaccaaaaggcctatgaattgcttaaagaaagtaatttgaatttcttaggtaatattgaaggtaatgaattgctattaggcaaggcagatgtggtagtaaccgatggctttaccggaaacgctgtacttaagaacattgaaggaacctctagcgtcttgcttcatttattaaaagatagtttattaaatggcggtgtaatgaccaagttaggtgccttaatggtgaagggctcgttatcaagcttaaaatctaaatttgatacggctaaatatggcggtgcagttttactaggcgttaatgcaccggtagttaaaacccacggtagatcaaatgaacgtccaatttatttcactcttaagcaagtagataaaatggttaaagaaaaacttgttgcagattttagagacgaattcgctgaaaaatagtacaatgttttattaaaaaggagaagttttatgtcagaagaagaaatttttaataaaattaaagacatgatcgctgataattttgatgttgataaggatgagatcactgaagacactaattttatgaacgatttggatgctgattcaattgatttggttgaatttatcttgcagctagaagatgaatttggcgcagaaattcctgatgatgaagctgaaaaaattaaaacaattggtgatgctgtttcatatattaagtctcatcaaggataattttctaaaaaaagccgtgtcgtgatttgcatacgaccggctttgtgtttagaattagaaaataaatagaaaagattaaatgcttttaataaaaaagctcgagatggaggaatgacctttggagaagcagagtgatcttttattagatattcaacacctgcatacggcataccgtttgcaagggaaattctatgatgcggcagacgatgttaatctgactctgaagcgcgacgagattttagccatcgttggtgaatctggttgtggtaagagtacaattgcctcaagtatcattggattgtacgaccataaaaatactaaagtaacaggggacattctttacaatgaattaaacctagttggcttgaatgaatcacttttcaataagattcgtggggacaagatcggaatgatcttccaggacccattagccagcttgaacccattgatgcgtgttggtgatcaagttgctgaaactctttattaccacactgatatggacgaaaaggcacgtcacgcacgtgtcattgaattgtttaatcaagtaggaatgccaaagcctgaagaaatgtacgaaatgtacccacatgagttgtctggtgggcttcgtcagcgtgttgtaattgcgatggcgattgcatgtaagcctgaagttattattgccgatgaaccaacaacagctttggatgttactattcaagctcaaattttggatttgcttgaagatattcaaaaacaatctcactcagggattattttgatcactcacgacttaggtgttgtagcagaaactgctgatgaagttgcagtcatgtatgctggtcaaattgttgaaaaatctgatgtaaagacaatttttgaaaacccacttcatccatatactcgatcattacttaactcaatgcctcaatcagacgatacggatgaagatcttcatgtaattcacggtactgtgccatctttgaagaatatgccacgtactggtgatagatttgctgcaagaattccttggattcctgctagcgcacatgaagaagaacctaaggtgcatgaagttgcgccaggtcactgggtaagatgtacttgctggaagtcattccactttgaggatgaaaagacagcaagtggggagtagtttatggcaaaagaaattattcaaatcaaagatttaaaggtctattacccaattcgctctggattttggaacagaattactgattatgtacgtgccgttgatgggattaatttttcaattggtgaaggtgaaacttacggtttaatcggtgaatctggttctggtaaatctactaccggtaaggcgattgttggggttgaaaaagttacaagtggtcaaatcatgtataagggtttggacgtaactaaggcaagcaaccgtaagaagcttgattataataaagatgttcaaatgatcttccaggattcaatgtcaagtttgaacccaagaaagagaattgaagatatcattgcagagccaattagaaactttgaaaatctgactactgatcaagaacgtgatcgtgttcaagaattgttggatattgtagggatgcctagtgatgcgatctacaagtacccacatgaattctcaggtggtcagcgtcagagaatcggtgttgctcgtgccgttgctactaaccctaagttaattgttgcggatgaaccaacgtctgctttggacttgtcagttcaagcacaggttttgaacttcatgaagcacattcaacaacaatacaacattgcttacttgttcatttcacacgacttgggtgttgttaagcacatgtcagaaaacttggcaatcatgcaccgtggtcgtttggttgaattaggtagccgtgaagaaatctacaagcacccaattcacatctatactaagcgtttgctttccgctattcctcaagttgatgttgaacatcgtgaagaacacaagaaacatcgcgaacaagttgaaaaagaatttgaagaaaatcaaagtaaatggtacgacaaggatggtcgtgtatatccattacaacaagtagcacctaagcactgggtagctttgccaaaagatatggcccacgaagctaaacttgaagaattagaagaaaaggagagtgattaagcatgtggaaaacgattttacggcgtttgttaatcatgatccctcaattgattatcttgagtttgctggtcttccttttggctaaaatgatgcctggtgacccattcagtggatcaattaaccctaacaccgaccctaaacaaattgaagccttaaaacgggctgcaggtctgtttgatccatggtacgtgcaatactttagatgggtgggcaacttgttccatggtgaccttggtacaagttacattcaacatgtgccagtaacttcattgattgctgaccgtgctaacaacaccttctggttatcacttttaactactattttgacttatagtattgctatccctcttggtattacttcaggtcgtcaccaagacgaatggcaagatactagtgttagaatttttaactacatcaccttggctaccccaggattcgtattctacatcttaggtttgtggctcttcggtttcaccttgggttggttcccaatttctggttctgtttcagctagtgcctctggtttctggggcgtacttggcagtagaatctatcacatgattttgccagcaattctgtatgccttgattactactactggtactgttcagtacttaagaactgggattgttgataacaaggttgaagattacgtaagaactgctcgtagtaagggtgttccagaaagcgtcgtcttccataagcacattttgcgtaactcattattgccaatcgctgccttcttaggtaacacgattaccggtcttcttagtggttcaatgatcattgaaagtgtatttagttatcctggtatgggtaagttgttccttgactcaattgggcaacgtgactacactaccttgactgccttgattcttatctttggtatcttaactttaatcggtaacttattatcagatatcatcatgagtatcattgacccacgtattagaattcaataggaaggagagaaaaaatggctgataagaaagaaaaagctacaaagaaagctactaaaaaagacgaaaagcaaaaagcaactctcccaccttctggattcaaggtggcaatgcgtgaaattgtgcgttcaaagtctgctttaactgctctgattatcattattgtcattttactgtttacttttggaggttcattattcttgaatcgtgcccaagtaacagaaatgaatattgctgactcatactatggttggggtgaagcgggccacttgctaggtacggatgatggtggtcgtgatatcttgaagttgctcatcatgggtgggcgtaactcaatcatgatcggtatctcagtaactgtaattactgaaatagttggtttagtagttggtttggtatcaggctactttggtggtgcaatcgactcagttatcatgagagttgttgacttcattcagattttgccacaaatgccaattattattgttttgactactgttatccctaactacaatgctgtaactttggtattcttgattgcgatgtttgggtggacaacgacggcacgttacttccgttccttcgtcttatcacagcgtggtcgtgactatgttttagcatctaagacttcaggttcatctaatttacaaattatgttccgtgaagttttgccaaacattacttcaatgattattatcgacgttgtattgagtattgcaggtaacattggtattgaaactagtctttcattcttgaactatggtttaccaagtaccacgccatcacttggtactttgattggttttgctaatgacccagttaacgttattaaccgtccatggttgtggttgccagctactatcttgcttttggtaatttccttaagtattaactatgttggtcaagccttacaacgtgctggtgacgcaagacaacgtgaaaactaataaagtaataattaaattaaaacagctctatcgcttggtagagctgtttttgcatatttataactagaatcttattgaaagcaaataaaataaaaattaaaaataatttcataaaactattgaatttttaatttatggtggtattatttaatcatcaacctgattcaaataactattgaaaatgaattgtatcctagatgggggaaacaaagtatgaaattatcaaaagtattgggttcagtaggagtcgtttctgcggcagcgttagctttagttgcttgtggtaagagtagcagtaacaatgctggcgcaaaggatgccaagaagtttaaggaaactactccagttaaggcagtcaaaaagggcggcactttatcatatgctgaagaaactgatacaccttttacaggtatttttaacaatgaattatcaacttctgctattgacacagatgtagcacagtttggtaatgaatcattatttgatactgatgacagttacaagattaatagcaagggacctgcaacttttaagttggaccgtaaagctaagactatcactaagtgtataattttttacggtaagttgaataaataattaaaaaagcccaagtcctttgaatttggacttgagctcaaacaaaaagaccagtagtctgatgttaagaacaaaaaacacattagaagctggtcttttatgaattcaattgtaactgaaatcgcaaatattataaagtctgaagataattatattaagcgtgaaagaaaaataatctgtttcttcttaaacctgattaaggaaatcatggccttggctttagctaaagttgatgatgaaatgattaccaaggttaaagcacagggctatcagattgataagaagaatgagcgctcaatcaatatggcttttggcgaagttaggtatgtcagaagaagatatgtctgcccaggcaaacaagcaaggtatcccttggatgaattaatgggctttgacaaatacaagcgctacagtattttagcagtcaaaaacatcttagaagtaagcagcgttgccacttatcgcaatactgctctagcagtcaattgcctgtctggctttaatattagccatatgcaggtgggcaatttggtaaaaatggccgggaaaaatattaaagcgggccaagaagcagattcaagatatgatgccgcaggcactaagaaaaaggtcccagttttgtatcttgaaggcgatggcgtggtgatcaaaggcactaaaagccggttggaatttcatcgctatcaggtctgtgaaggcattgtcaatataagcaagaaacgcagaaagcgaatcaatgccgaggaatttgtttctttaagccgacttgatgcgctgaacgaagccaaggagtacctggccaatacttatgatctttctgatactgtaattcttagcaacgccgatggcggtgctggatatgccaaaacagacttcgatgacattgtagggctatgcaagcgtcatgagcatttcttggatgtctttcacctaaataagaaaatcaaagaaaggctatattttgcgcctgacctgcaaggcaagctgatttctgctttggaatacaaatacagctatgacaaagttaaaactatcctaaccactgcagaaagccgactaattgatgaattgaataccgagctcaatcatgattatctggggcgcctaaggaattatattgatcgtcattgggacgatattaagccgtttaagaaacgaaaactgactgtgactaaagccattggctgctgcgagagcaaccaccgcaagtatacctaccgtgttaaggggcaaggcaagaaatggtcaaaatctggagcagaaggcatgcttaggatcttaagctgcatcaagaatcgagagctggaattttggcttagcagcgagtttgaagattcagaaataactgtattgactgaacaggaattaaaagcagcggcccgtgacagcttaaagaagcgtcatgaagttcatttaggcatccagcatggcgcattaaccgcacaggtagctggcaatagttatttaagcaagctaagcagaaatttaagtcatataaatatttaagaaattaaggttagactaatggtttaaaggctaccgcaaaaacattgacacttacagactatcactattgaagttaaaaaaggtgttaagtggtaagatggtaagcaggttactgcaaaagatgtagagtatgaatatgaagttatggctaacaagggcacaaagtctcaacgttatactgcttcacttcaaaacattgttggtgtaactgaatatcatgatggcaaagctaagactatttcaggtattgatatgccagatggagcaaatggacgtaaagttgtaattcactttaaggaaatgaaacctgggatgcttcaatcaggtaacggatacttcctcgaaaccgcaagtccatatcatcaattaaagagtattccatttaataagcttgaatcatcagatgctgttcgtaagaatcctttgttctttgggccatacaagattagtaaaattgttcgtggtcaatcagtaacttgggttcctaataaatactactggagaggtactccaaaattagataaaattacggtatctgtagttaaccctaactctgcttctcaagctattaagagtcacaaatttgatattgctagagttgttaattcacaatggcaacaggttaagaacactaaaggtgttaactttgttgctaaagtaccacttcaatacagctacatgggcttcaaggttggtaagtgggaaaatggtaagaatgtcatgaacccaaaggcaaagatgaacaataagtcacttcgtcaagcaatggcctatgcaatgaacattgatgctgtggaaaagcgttatactcaaggcttaacattcagagtacctactttaattcctgaacaatttggaaattactttgacaaaaatattaagggatacaattataaccttaaaaaggctaataagttacttgatgacgctggctacaagaagaaaggtaagtatcgtgttcaaccaaatggtaagcctttgaccattcaccttgcagctatgtctggtagttctactgctgaaccaattactcagaactacattcaacaatggaagaagatcggcttgaatgttaagttaacaactggtcgtctaattgaattcaattcattctatgataaagttcaacatgactctaaagacgttgatgtattcatggctggttggtcactatctagcgaaccttctcctaacgatctttacaatgaaaaggcaccatttaactacactcgtttcgtaactaagaagaatactcagcttcttaaggacattgactcacaaaaggcatttaataataaatacagagtacaaaaattccacgaatggcagaagtatatgtttgatgaagcatatgttgtgccaacagttaatgcataccaaattgacgctgtgaatagtaagcttactggctactcacttaagccttcagatgctaactcagtttggtacaatgttggttacgctaagtaattcattaatcattagtaaaactaaactccaaaattctaaacataaacaaattccttatattaaattctaataactaactaatagaaaagacaggtatcttaatccaaatacctgtctttttcatgctattgttatgtttttgtaatagtgataaaattaaaggatcaacttgctccaagtaatggaggaattttactaatgaaaaaggcaaaactttttgctggtattacactgttatcaggtgtagctcttaccttagctgcctgtggtaagtcagaatctcattctgatgaatcaaagactgcttctaagtttaaggaagctgttcctactaaggctactaagaatggcggtactgttaaggttgctgttgaagctgataccccatttactggtatcttcaacgacgaactttcaacttcagctactgatactgaagttatgcaatatggtgcagaatcactttttggtactgatgatcactatgttttcaatgataaaggtgctgcaacaattaaggttgaccaaaaagctaagaccgtaactgttgaaattaagaagggtgttaagtggtcagatggtaagcaagttactgccaaggactatgaatacgcttatgaaattattgctaacaaagacactaagtcacaacgttacacttcaagtttagctgatttggaaggcttacaagaataccatgaaggtaagtcaaagactatctcaggctttgaaatgccagatggtgaaaacggccgtaaagcagttcttcactttaagacgatgaaacctggtatgaacacttcaggtaatggttacatttgggaagctgctgctccttaccactacttgaaagatgttaaattcaaggacttaatgtcaagtgataagatccgtaagaagccattgttctttggtgcttacaagttgcaaaaggttgttcgtggtcaatcagtaacttgggttcctaacgaatactactacaagggtaagccaaagctttcaaagattactgctacagtaattaaccctaactcagttgctcaaagtattaagtccagaaaatttgacgttactcaagtaatcaactcacaatggaagaacatcaaggatactaagggcgttaactttatcgctaaaattccactacaatactcatacttaggctttaaggttggtaagtgggatgccaagaagggcgaaaacgtaatggacaagaattctaagatgaataacaaggccttacgtcaagctattggttatggtatgaatgttaaccaagtttacaagcgctactcattcggtttatcattcagaattccaactttaattcctaagcaattcggtgattacttcgacaagaacatcaagggttacacttacaatatcaagaagggtaacgaaatcttggacaaggctggctacaagaagaagggtacttaccgtgtacaacctaatggcaagcctttaactattcgtttagctgctatgactggtagttcaacagcagaaccaatcgttcaaaactacatccaacaatggaagaagatgggcttgaacgttaagttaactagtggtcgtttaatcgaattcaattcattctacgacaaggttcaaaacgatgatccatcagtagatatgtttattggtgcatggtcattatcaagtgaaccatcacctaatgacttgtatagcgaaaaggctccaatgaactactcacgtttcgtaactcctgaaaacaccaagttacttgacgaaatggattcacagaaggccttcaaccacaagtacagagttgaaaaattccaagaatggcaaaagtacatgtttgatgaagcttacgtaattcctatagctaatagttactcaattactgccgttaacaagaagcttactggttactcacttaagccatcggattcaatgggtaatggtttccctaactggtacaatgttgcttacgctaagtaaagcaattatttaaaattacaaaagactgtttctaaattttagaagcagtcttttttctgtgacccgaaaactggtataatttataggtataaaaaggggcatttttatggtaagtacaaagtttttaaaaaaattaaaagacgattataatatcgaatttaacaatgaaaagctattagaagaagcatttacgcattcttcatattcaaatgaacatcccaatgatggaattcgcgattatgaaaaactcgaatttcttggtgatgctgtgctagaattagccgtttcgaattatgtttatcttcattatcctaagttgaatgaaggtgaattaactcgtttgagatctaatattgtccgaactgaaggattttcagaattcgccattgaatgtggttttcaagatgagattcacttgggcaatggtgaagaaaaagctggagcacgacaccgcaaaactttactggaagacgtgtttgaagctttcaatggggcacttttccttgatcaagggatgccagcagttgaacattttttgcatttaacagtttatccattgattgataagggtgaattcgatgattcacgcgactataagacagacttgcaggaagtattgcagcaagatggtcctgtgaatatcgaatacaccgttattagtgaatctcaattaccttcacactttgttgttgaactaaaaattaacggaaaagttgaatcaaaaggtgagggtcacaataagaaagcagctgaacaacaagctgctaaggtcgctttacaaaaattagaaaaataaggggatgaaaaagtgccattaacagaattagtgctcgatggttttaaatcattcgctgataagacaactattcattttgatgatggaattactggaatcgttggtcctaatggttcggggaaaagtaacattactgaagccgtacgttgggtaatgggtgaatccagtgctaagtcactacgtggaacgaatatgaaggatgtcatctttgccggtagtcaatttcgcaagccgctcaataaggcggaagttactttagtttttgataataaagagcgtgagttggcttttgattcagatcaggtctcaattactagaagatttctgcgatcaggtgacagtgaatttttaattaataatcagcaagtgcggatgcgagatgtgcggacactctttcttgattctggaatttcacctaatagcctagcaattatttctcagggtcgagttgatcagatcttaaattctcgtcctgaacaaagaagagtaatctttgaagaagctgctggtgttttgcattttaaacaacaaaaagaagctgccaaggcgcaaatggagaaaaccaaggataatttaattagaatcaatgacttggttaaagaacttgaaggtcgattggagccgctgcatgagcaaagttcgctggctaaagaatatcaatttcaaaagaagggactagatcagaaattaaaaagtctattagcttttgaaattgaggatttaaaccggcaaaaagaagaagtccaaaaagcagcagataggaaccaaatcctgttaacaaaactggataatgaagtaaaaggttcgcaaagtgctgtttctgaaaaacgggcagaatatcaaaaaattcaaaatgagcgagagcaaacgcagagtgaattattaaagctaagtgaccaattatcacagatcaatactaacttgcaggtcgcacagcaatcacaacagtttaataattcaactagggtagaaactcaacgtcaagttgaagaattgaaaaatagcttggttaagctaaaggatgaattgtctgaactgcagcggaataaaaagcaacttaagcaggagcaagatgctttacaagagcagcatgatcaattgactggtaaattgcacgatgatccagaagaattgagtaagcgactagaagattgtcgtaacgactatattcaacttttacaagatcaggctacaactaataatcagattgttaatctgaatactgaattaaaacgtagtcaggcagacactacttatcaaaatagtgatgtaagcaagcagctaaccgatgctcggactgaactggaaaagctgagaactgaaggcaagcagctgacagttaagcggcaaaaggaaaaagaaaaatttgcgcaagttaatgatcaaaataatgatttaactaaacagattaatcagattcggcaagccgttaacgcagagcgcagtaaattagagaaagttgaagcgcgacatgaagctttagtaaatattcaaaagcggcatgagggttattactacggtgtacgtaatgttttgaatcatctatctgatttccctggtgtgatcggggctgtgggtgaattgattacatttccagttgagctagaagctgcaatgacgacagctcttggcggtggcgtacaggatttgattactgaaagcagagttagtgctagggatgcaattaatcaattaaagcgtagtcgtagtggacgagctacttttttaccattagatggcttgcgtcaatatactattccacagtcaactatcactactttgcaatcttttagtggctttaagggcgtagcaagtgatttagttgaaagtaaagccgatcaagatattactgctgcgattaattatttgctgggtagtgtgattatcgttgatacgattgatagtgcaatgtcaatttcacgtcgagttaaccgctatcggattgttaccttagatggcgatgtgatttccccaggtggttcgatgactggtggtcaaagaaaccaacgtaataattcaccactgcagacggcaactgaaattaatcagttagagaagcaattacagactttacgacaaaatttggctgaagatcaagaacggttagatgagctagttactcaaggtgaaaaagttgcggctaaattgcaacaactgcgtgatactttgcaggagactaatcaagcgattaatgaagctgctatttctttccaaaatcaagaaaaggaagtaaagcggctaactgatgctaatagtttatataaatctcgagtaaaagaacaacaagatcggattgctgctttaaagaaagaaatcactcaggctaatgatcagcaggaacaattggctaagcaaaatgaagtacaaaagggcaaaatgaatgacttgcaagaaaagattaagaacttcaatagcttaagtcaacgtgtacaagaggaattatcaaagcttgatcctcaaattgcagtttatactaataagttggaaaacttagctagtcaggaaaaagaaaaaaatattcagatcactaataatcagaagcaaactgatagcttagagcagaaattaactgaattaagtcaaaatggtgaattatcagttaaaaagaattctgatttacaaacacaaaaagctgaaattaagcaaaagaatgaaactctgcaaaagaagctgaatgaacttagtgcgcaattaggacaagttgatgcgcagattaatcaacttgaccaagttgccagtcgtaattatgatttacgcaaagatgcagcaattgaacaagaagattactcagtaaagattgcgaagtttaattccgcaattgatcagcgcttgtcaactttgagtgaagagtatgccttaacgtttgaagctgctttagagcaagcagaaggcgaaaatactgaagaaaagcgcaatgaactggctaaaagcgtgaagttgcatcacatgtcaattgaagatattggccaagtaaatcttgattctattcaagaatatgaagatgtgaaaaagcgctatgactttttgaatggtcagcaaaatgacctgttaaaagctcgtgatgaccttgaaaagtcaatgaacgagttagatgaagaagttaagacgcgcttcaagagtacctttaatcaagtagcatctagctttaagagtatttttccagttgtctttggtggcggtaaagctagattggaactcactgagcctaataatttgctagaaactggaattgagattatcgcacagccgcctggcaaaaagcagcaacgtttaagtctgctttctggtggtgaacgcgcgttaaccgcaattactttgttgtttgccatgttgcaggttaatccggtaccattttgtgtacttgatgaagtagaagctgccctggatgatgcaaacgttactcgttttgcgcaatttttgcttaaatacgatatgaaaacccaattcatcgtgatcacgcatagacgagggacgatgcggcaggctgaccaactatatggtgtggttatgcaagaatctggcgtttcgcaagtattgtcggtttcattaaaagaaatgaagaataaaaatgaggtgaaatagttgggtttatttgatcgaataaaaaaatcactctttggtaaaaaagacgaagaggatgaaaacaaaaaagaagaaaaacagactgagcaagaaaatgaagctaagactgaatcagaagataatgatcaagaatctgaaaaagtagttgatgaagctaaatcgaaaactgaaactactgatgaagaagaacaaacagtagaagcacaagaagactctgaggtagaagctgaatctggtgatgaagaaaaagcagtagatttagattctaaacaacagcctgaagaagttaaagtagaagagactactgagactgaaacagaagaacaagttgaagaaactgaagtttctgatgaggagccaacagaatcacaagaacagctttatgaaaaggggctagaaaagactaacaagggatttggtgcaagacttaacgccttttttgccaagtttagaacagttgatgaagatttcttcgatgatctagaagacttattaattgaatctgacgttggctatgaaactgctgaacaattaactaatgaattgcgtgaagaggctaaattgcaaaatgctaagtcacgtgatgacttgaagcgagtaatcgttgaaaagttggttgacctttacgataaaggtggcaatagcgaagatgagcaattgacgtataatgctgaagctaaacctaacgtttacctacttgttggtgttaatggtgcaggtaaaactactacaatcggtaagttagccaaacgttttaaggatgaaggaaagtcagtaattttagctgcggccgatacctttagagcgggtgccgttgaacagctagttgaatggggaaaacgtgttgacgtacccgtagttactggtaaagaaaaggctgatcctgcttctgttgtttatgatgcaactgaacgggcaatcagggaaaaagctgactatcttttagtcgatactgcgggacgcttacaaaataagaagaatttaatggctgaattggaaaaaattcaaagaacaatcaagaagcttttaccagatcagccaacagaaaccttgcttgtgttagatggttcaaccgggcaaaatgcgcttttgcaagccaaagactttgacaagaccaccgaattaactgggcttgttttaactaagttggacggctcatctaagggtggtgtagttctagctatccgtaacgaaatgaatttgccggttaaattggttggcttaggcgaaagagctgaagacttagctgattttgatgctgcaaattatgcgatcggtcttttccacggcttggtctagtgataaagttagagatgtaaatattgttttataaggagaattttatgaaagaatatagtgcttgtactactatcttagttggtaaaaatgcctcgattgatggcaccactatgattgctcgtaatgatgacacttttcgtccaattaccccacaaaagttcattattgagccagcccgtcatggtgaaaagaaacatattaagtcatggttaaacaagtttgaaatggacttgccagaagatgcgcaacgtgtaccagctgttcctaatgttgactacaagcatcgtggctactacgatgaaagtggaattaaccaagaaaacgttgcaatgtcatgtactgaatcaacttatggtaatgagagaactttagcatttgatccacttgttaaagatggattagatgaagactgcatgcagacttctgttttgccatacattcattcagctcgtgatggtgtacaatatttaggtaagttaattgctaagtacggttcaccagctggtaactcagttttattcagtgataaagatgaaatttggtacatggaaattgttacaggtcaccactgggtagccgagcgcattccagatgattgttacgctgcaactggtaatcgagttgcgattgaacaagttgactttgataatcctgattacttcatgtggagtaaaggtattcaagaatttgttgaagaacaccatttgaacccagatcatgaaggctggaacttccgtcatatttttggtacctatactgaacaagatcgtcactacaacaccaaccgtcaatggtatattcaaaaattgttcaatcccgaaattgaacaaaacccacaagatggcgatattccatttattcgtaaggcagctaagaagatcactaaggaagatattcaatttgctttaggttcacactaccaagataccccgtatgatccatttggtaagggtacggatgaagaaaaacatcgctaccgtccaatcggtttgaaccgtacgcaaaatgctcatattttgcaaattagaagtgatgttccagcagatcgtgcggctattatgtggttatgtatcggtggtccaactttcactccatttgtaccattctttgctaatatgaatgatactgatccttcatataacaatacctcaatggattacaatatgaatgatgcatggtggtattacaagtcatttgcagctatcgttgaaagtcattacccacaatttgttcagcttgatactacttatttaactgaacttaaccgctacttcagaggtcgagttgaagaaattattgctggtgcagaaggtaaatcaggtgatgaattaactgaatatttgactaaggaaaatcaaaagactgttgcccatactcgtaaggaaactgaaaagctttggggtcaaatgatgattgaatcgatcaacatgtccaaacttactttcaatatggatgaaaatctttaataaattcaaaacagctcgaaaaagggctgttttttataatatgtgaaatgaaaggaatatagacaatggcagaaggtactattggctcattttttactaagattaacaatgaagttgaaaaacaaatgaataacgatttaaaaaatttggtattaatgctaatgaattggaaatgcttattgaattaaatcatcatcagcatggcaaaacttttgaaaagttggctaaagaattgcatgtaactaatgacaaggtcaaatctttgacaaaaaaattggctgccaaagatttgtgcaagaaatttgaaaagcaccgtgcagaaactgaccaaactattacagggatgctcagtaaagatgaaactcttggcttggttaatgtactgaaaaagatgcttaagtcgagtgaagacaataagtaatgtaaaatagtagagtgtctgggaaaaaactagcttccagatgaataaaaacgatcaagatttccttttttaagaatcttgatcgtttttttgttctctttaaaatttttaacaataaaaatcggcccttcagccaccttctttgacaatatttgttcaaattcatcatcataaaggcaattccgatatcggtttcgaccttctctttacctcgcaggtgcgttctgcgcatgccaaatacgttcttcaaatgtccgaaaactggctctacatcatattttctcatgccatagatgtgtctgccttcttcgctttggagaacttcttttgctttttcttttaaatattgccagttaggattatagcgaacttggcgctggcggccgctagctgttttagccaattgttccaattctggcgttagctggaactcgtctgcctcataaaccttaaaatcacggacctgaccagtagaacgatccttgcgctggctgtaatatttgaaattgaatctgacgccatgatgatcaatgtaataatcatctttttcattgtagtaccagttgattagcttagttggatcattcttatactttttggtctgttctttttcatacatagtgtagggaataaagtacttcttgtctggatatttttcctccagcatcgaataattgtattcactgccatagccagcatcggcgacgattttgtcaaacttgtccaacacggtcatttgatccaaaaccggctccaaagttttgaaatctgtcggattaggaaagatggcataatcaactacatattgatcggtcgtgactgcttgaatattgtagccaggctttaattgaccatttttcatgtggtcttccttcatatgcataaaggtggcgtcatgatctgttttggaataactgttgcgtccggcaaagatctcttcggcttcttcatatttttgcattcttggcacataatcttttcttagccggtgcagaatcttttttagtccacgtcgcttggcttttcgaggtgaaccgccaggaatggctttgttttcctgctcaatctctttagtcagcttgttaatttctgcttcagtttcttgagctaattcctttagcccctgactagtttgaactttttctttttccatttctttgactacttctttagtaatcaattcatcataaagttcaactgcctggcctttcagcttttcatgatacttttcaaccgctttgcgccagacaaatgtatagcggttagcatcagcttcaatcttagtaccatcgataaaagcagcaccttcattgattaagccttcatcttctaacaggttagtgaagtagataaagctctttttaatcagttcattggcatggctgcttgatctaaaattattgatagtatgatatgaaatcttttgctggtcagccaagatcatcattggcagattttcttccagcatcaactcaatctttctgccagaaaaaactcttctggagtaagcaaaaagcagtattttgagcatcatggctggatgataggctgggcggcccgttttagcagtcttgcctactaaaacatcttctggaattgaatctacaaaccagctgatgacattagccaaatgattggccggaatggcaaaatctagattaagtgttaaagcagtttgacctgtgatataattcttgtacatgttagtttccaccttttttattttgtgatgatttaataatatcaaggctggagctaaaagtatacaaaaagagcgttgaaacaaaaattcaacgttcttttttcatgatctgagacttagttttttcccagacacttttttatgcaaaaattattgacaaatctttaatataatattactgtattaagtaaatagaacagtaatattattagtgaaaggataaaaatgtcagaaattttaagagtggatcaagtaactaagacttatggtaaaaaaggtgagaagcaataccaagctttaaaaggaattagctttgccattgaacaaggtgaattcgttggcattatgggtgcttctggttcaggaaagacaactttattgaatatcttgtcgacgttagataagccaactagtggacatgttttagtcaataagcaagacattactgcacttaagaacaatcaaatggcagattttcgcggaaaagaaattggctttatttttcaagatttcaacttgctagataatttgactaatcgcgagaatatagccttgccattatcgcttcaaggagtgaaggcaaaggatattgacggaaaagcaatggcgattgccaaaagattgggaatagaatctatcttggacaaatacccagctgaaatttctggtggtcaaaaacagcgtgttgcttcagctcgagcattggtccataatccggcaattttatatggtgatgaacctacaggagctttagattcacaatcagctacggaattattgaaaacaatggcagacttgaataagaatgatcaagtttcgattctgatggtaacgcatgatccttattcagcttcttacgctcaaagaattttgttcatcaaagatggaaaaatcggcaaagaaattaaaaaagaaaataagaccagagaagaattttatcaagatattattgctgaattaggtagacgttagagggaggtatagacgtgctttggaaattatcactaacagggctaaaaagtcgctttaaagattatgctgttttgttttcggggctaactctagctgctgcaatcttttatatgtttatgaccattgcaattaatccagcttttcttaagggttcaatggccattgccttttcaattacccagatggtctttatttttgggatagcgctattagctattattaccctagtctatattgtttacgcaaatagttttttgcttagtatgcgtaaaaaagattatggtacttatatgatcctaggagcgagaaatagtaaaattggccgtttaatttttacagagacggttgttattggtttactcgctactgcattaggaattttaattggtatcggcttgactcaagttgtttctcagttattaatctctcaactgggtttgcagctgcataaattcttaggcttttatttaccggctattttatggacagttgttttctttgtagttttatttttcttggctgcaatttggaatcggcacaaattggtaagtactagtgtaatcaagcttttgcatgaggatcaaaaaccagttaagttacgtaataaccgaatctggaaagcaactgaagtaattctaggccttgcccttctagccattggctactgggcaatgtgggattaccatcagttgcaaattaaatcggttgaaattggttttgtcactattttggctggttcatattttgtatttgattctgtatttactacagttatcaatgctttacggaaaaataaaaagtttaaatacagtaaactgcattcttttaccttaggtcagctaaaatttaggttaggtgattacaatagagttttaactgttatttccttgctttttgctctagcattaggtgcgatcactgttggattaaactttaataatatgacagagactgctcttcaggcaacatattatgatgctgtgttgtataaaagggatgctaaagttaatcaacaacttaaaaaagttgccgttagaaaacaaacgactttgaattataaggtcaatgggaaaaagaagtttcctgttctatatgttactgaccaagaaattgctaagaaaaaaatcaaattccaatctggtcgaaagaacggcgaccaaatgaattggaagacaaagacgattacagttgcaggtgtaaagaataaaaaacaagagatgaatttccaacttgctagtttaacaccttattctgattatgaggttaaagttgtaactccagctgaatatgtgaagattcctggaaaaaacaaacaagtaaccttgctattaatcaataactttagaagtaattttaataatattgaaaaattgcaaaagatgtcacttgaccagacagttactaaggatgcacaaggagtttatgtttctctgaataattctaaatctgctcaatatcgcttagtagcaagcgttgcgtcaggttttgaatttatgggcttcttcttaggcttagctttcttagctatgttagcttcaaccttaatgtttaaagtgctatcaggagcaaacagtgatcgtcctcgatatgaaatgttgtggaaggtcggatcaagacgtaagttattaaagagctcgattaaagcggagattggtaccttgttcgctttaccggctgtcttgggtgtgattgatgtattatttggactacaatttttcaaagggattttagctaatccatacgataaaatttggattccatttacgatctttttagtattgtatttgctttattacttaattacagtaaaactctatgaaggaattgtattgaaaaaataatggtacgaaaaaagatctgcaaaatgcagatctttttaactgtatttagattaattttatttattttgcttatttaaaattgaatgacgaacaccatagctaaagtaaatgattaagcctaaaataaaccaaataccagcataaaatttagcttggtagtcaagccctaagaagacaattaaagcagccatgaaacctaaagcaggtaaaactggataaaatggcatcttgaatgaaggatcatcaatgtcttttccttcacgtggacgcaacttataaatacctaaagaaacaaacataaaagcaattaaagtaccagctgaaaccaattgtgacaacatggagaaggggaaaaatgctccaagtaaaattgctacgattgttaatgtccataaagcattattaggtcgacgatctgcattcaacttgcccagccatttaggaagcatctcgtcacggccaaatgaatagatcaatcttgaaccggccatactcatcccaatcaaagcagtgaacatccctaaaacagcaatggtttggacaatgatggcaacaattggatgaccagcaaaccgtaaggctaaacccactggttcagcggaattagcatacttctgataaggcataattccaattaaaactaaactaactccgacaaataaagtaacagcaatagcaagtgagcctaaaatgctgcgaggcatagttttttgtggattaattgcctcagctgagttagcggcgattgaatcaaagccaatgtaagataagaaaatcattgaaacaccagcatagattccttgccagccaccgaatggaccgttagcagtcatcttgtatttcggtataaatggggtgaagttaacttttttaattgcaaaaacgccaacggcaataaagagtagaatggctaacacctttaatacaactaaggcattttcaacgcgagctgcccttgaaacaccatgaccaattaataaggcaactaacaagattgaaactaaagaaatgatatcaataataccaccgttattgccaaaggcgttagataatgacgcgggtagtttccaacctaatggtgcgattagagctctaaagttagcagaaagccccgaaccgacgaaagccaaagcaatgaaatattctgctagaagggcccatcctgctacccaaccccagaattctcctaaaactacgttgatccatgaataagctgatcctgcaaatggcattgcagcagccatttctgcataggcaaaagccactaaaccagcagcgattgctgctaaaataaaggaaatcgctactgcagggccggtatgcttagctgcaacttcaccaggtagagtgaaaattgaagcggagacgattgttccaacacctagagctaagaagtcctttacttttaatgagcgcaccaggtgtccatctttattttcatagacgcgtggatcttctttactgttcattctctgccaaagattcacaacgcaacttcctccttatgttaaaatatattcatctaattataattaaaagtacgttaaaaaatcaactattacatatttgaaattccactttttttagaaattgttatctaagataggttaatctagcactagcttatgacctttgttatactaaagactggtgaaaatcaatggatgaactaactaaaaacgaggagctaggcgatttatatgcctactatggctctttattaacccaggggcaacaatcttattttgaagactattactacaatgatttgtctctaggcgaaatagctgctaatcatcaagtatctcgtcaggctgtctatgataatctcaagcgctcaagtaaaattcttcagaactatgaagagaaattgcatatgaagcgcgacaacaatcaggttgaagatgtcttggcagatacgcttttatctttagataatggtgatagtgaagctgctaaaaaagaaataaccaatttattaaatcaattgaggggagaatagcccatggcttttgaaaatttaagtgaaagaattcaaaaagcattaaaaaatttaactggcaaaggtaaggtctcagaagaagatattaataaggctagtcgtgaaattcgacttgctttgttagaagccgacgttaactttaaggtcgttaaggactttattaaaaccattaagaaagaagcccttggcaaggaagttcaggaaagtttaaacccaggtcaacaagtaattaagatcgttaatgaacagttaacgaagatgatgggtgaagaagcagttcctttaaacaagtctaagcatattccaactatcattatgatggttggtttgcagggaactggtaagactacgactgtgggtaaattagcctatcatttgcaaaagaccgaaaaggcccgtccgctgttgatagctggcgatatttatcgtccggctgctgttgatcaattgaaacaaattggtgatcagttaaaagttccagtatatagtgaagacggagaaaaagacgtagctaaaattgttcaagatggacttgcagaggctgaaaagaacaagaatgactatgttttgatcgatacagctggtcgtttagaaatcgatgaacctttaatggaagaattagagcgggtaaagaaagtaacccatcctgataacattcttttagtcgttgatgccatgactggtcaggcggcaacagatgtagccaaaggctttgacgaacgccttgatgttacgggcgtgattttgactaagttagatggtgatactcgtggtggtgcagctctttcaattcgtgcggtaactggtaagccgatcttatttactggtcaaggtgaaaaattaagcgatttagatgttttccatccagatagaatggcatccagaattttaggtatgggtgacatgctttccttaattgaaaaagcccaacaagattatgatgctaaggaagctgaaaaagtcgctgaaaagatgcgggaaaatacttttgacttcaatgattttgttgatcaattgcaacaagttcaaaaaatggggcctcttgaccaaatcatgaagatgattccgggactatctaataatccgcaattaaagaatctaaatgttgatcaaaagcaaattgatcatactgaagcaattgtttattcaatgactcctgaggaacgagaaaatcctgatatgcttaatccaagccgtcgccgaagaatagctgctggttcaggtcgtcctgtagttgaagtcaataggatgattaagcagtttaagcaaatgcgcgacatgatgagtaaaatgtctaaaggaaatatgaagggcttgagcaatttgcctggaatggattcgccaatggctaagatggcaatgcgccgaatgaacaagaatttcaagaaaaataagaagaagcgtttacgcaaggtaaaaagattccattcttaaaaaataaactgttaaggaaaaatactttacacctgttaagtttggtggtatattattaatcgttaagttttaggaggaaattaatttatgtcagttaaaattcgtatgcaccgtgctggtgccaagagaaagccattttacagaatcgttgttgcagactcacgtatgccacgtgatggtcgcttcatcgaacaagttggttactacaacccagtttcacaaccaaaggaattgaagcttgacgaagacaagatctttgaatggttacaaaaaggtgcacaaccttcagacactgttagatcacttctttcaggtgctggcttgatggctaagttgcacgatgcaaaatacaataagtaattttgctattaattaagagcttgatgccgtgtgcttcaagctttttttatacctaaaggagaaaaaatggaatattacgatgttgctcggattttaactacgcacggtttgaatggtgaagttaaagttagtataattactgatttccctgaagatcgttttgctatagggatgcatttggcaatcaaaggtgaaacttctcaagttttaactgtggccaagagtagaccttttaagcaattttggttagttcaatttgcagagattactgatattgatcaagctgaaaaattaaaaggaaaaatactagttgttagtgaagccgaccgcggtgaactacctgaaggcgtttattattataaggacatctttgactgtgatgtcattgatgaagaatccggtaagcgcttgggtaaaatcactgatattgaatcgcctggtgctaatgatatttggctagtccatgaagataatggtaaagagtattggattcctaatattgcatcggtggttaaaaaagtagatgtagctaataaaaaagtctatgttgagttattggagggcttacgcgatgaagattaatgtattgacactttttcctgatatgtttgctcctttgcaagtttcaatgttgggacgtgggcttgaagataaaaaatgggagcttaatttagttaattttcgtaatttcactaccgatgtacatcatcatgttgatgatacgccctatggtggtggcgctgggatggttttgcaaattatgccgattaaaaaagcacttgactcgttaccatccacaggtaaggtaattattactgcaccacaaggtaaaacttttaatgaaaaaatagcgcaaagctgggccaaagaagatgaattaacctttatttgcggacattacgagggctttgatcagcgggtttatgacttggctgacgaaactgtttcaatcggtgattatgttttaactggtggtgaattgccaacaatgagtatgattgatgctacagtaagacttttacctggtattttgggcaatgcagctagtccagttgaagaaagcttttcacatgggttgttagaatatccgcaatatacgcgtccagcagattttgaagggcaaaaggtgccagagatattgactagtggcaatcatcaaaaaattgcacaatggcggcataaagaggctcttagaacaacatatttgcatcgacctgatttgctcaaagaacgagttttaacaactgaagaaaagaaaatgttggcagatattaaagcagagcttgattaagcaagctctacttgatatactattcatcgtggcgtgaccacaatgaataagtttaggggtgttccgctggcgttggtacgttgatgaatgccgaagaaggagaaaagtatattatggatccattaattcaagaattaactaaagaacaacttcgtgacgatattcctgcattccgtgcaggtgacactgttactgttcatgtacgtgttgttgaaggtactcacgaacgtattcagttgttcgaaggcgttgtaatcaagaagaagggtactggcatcggtgctacttacacagttcgtaagattgcttcaggtgttggtgttgaaagaaccttcccagttaacgacccacgtgttgctaaggttgaagttaagcgtcatggtcgtgtacgtcgtgctaagctttactacttacgtgaacgtcacggcaagtcagcaagaattgctgaagcacgtcgttaatcataacgtcaatcataaaaaaggtcagttccagtggaactggctttttttctacccaaaagttgtatataaaatgctatgatggagttatggaatgaatgaggtgaaataaatgaagttcaattgcaaatttgcacttgtggcagcaaccgtattgacagtagcacctatattatcttttcccaatatcacgactacggtacaagcaacgacgaagaaagcccaagcagctaagaatacaatccaggtaaataaagcaccaataatttatgatcgtgcaggtaattataattcgaaatatcatcaaaatatcaaagctggtactcatttaaaatatagtggcaagacttatattattcagcagcgctttgcagctgggattcctgtgccaactagtcgaattattggtggtaagctttactattcgattggtaaaggaggctatgttaaagaaagcgatgtgttaacctggcttggtaacacaaatacggtcaagttacattttcggcacaagaaaaattatatttatgataaaaatggtaaaaaattagttagctataatggtggcaagaattattttactaataaacaaaaaccaaaaattgaggtaccatactataattcgcctaagcaattatttaatattggtaagggcggttatattgatgccagccaagtaactactttgaatggcaagggaaccgtgtttttaaataataatgcacctatttatgatgcaacaggcaagcaattcaagaataaaaatctaaagcaaggcacggttttaaactattatggtaaacctaagaaagcggctgctaatactcaattttattattatcaaaataaaactaagatgactttacctgcaattcaacaaggtgatcatacttattttcagattagtaaaacacaatatatcaatgcggcagacgttgctttagtagatggtaagacgttgtgggataaaggacctgtgagtgtttctttaataaatgatgcatatgcgtatactgccaaatttaagcaaaataaaaaggtgctttatcgtgctggcgctaaactaacggttgatagaaccaaaatagaaggtgaaaaatcacctcaactttatttacatgttaaaggtaccaaaaactatctttatttgggtaatgaaaaagactatggcgcatcaccattagattatcgtcacggttcaactaatttaatattgcagacactgttgcataattagtctgtgtgtaatacttttaaactgatatcataaaggactattatcttaatagaaggtgatagccttttattttaaaaagatcacaatgataaaatggctgtatagtagtaatgatgaaaaaagattgtgaagaaattcaaccgtgaaacggttgtgaaactaagacaaaaatcacaaagctggcagatatctattactaatcttgatataaaggcatttgttattgtgaagctatttttgtaaaaaataatattaaatgtggaattagcgttagaaataatagttatccacatttgtaaatgtccccagtaaagtcgagtaaaacaaaaatttaaaagaagatggaaaaatggattatccgaaaaaactgattgacgaagtgaaagaacgatctaaaggcatgcagctagaaggaattaattctggctcgggtccccaacatcctttattaatgattgtcggtgaagctcctggtcgaaatgaaattgttaataatattccctttagcggggatgcgggtaaggaattggataaatcattgaagcagattggtctgacacgtgatcaggtatatattacatctgctgtgagaagtcgaccttttgcaatcaaaaaggtttttagcaagcgtgaaaataaagaagtaatcaaatatcccaatcgtaagccaaccaaaaaagagattctagctcatgcgcatttcttagattttgaaattgactatgctcaaccaaaactaattgttgccttgggtaatacgggattagaacgtcttttggggtctggtcataagatttcagctgaacatggtcaagtaattaaaaatacaccaattttacgtttaaatgaaactaaagacggctatatttggtcaaaagaaagatacactattttcccagaatatcatcctgccgctgttttttataatcgcaagctaacagatgatattattaaagattgggataaaatcaagccgtatgtagaaaaggaaaaatctgaaaatgagtaatgaaacttttttgattccaattagacaaaataatgatttatcggatatcgctttaaatgaattacgcatggatctagatgagcatgctttacatcaacgttattacactgatattgcttatttagcaggaaatagtcgtaagtatagtctaaatagtgtacaaaccgttgcgagtcctttgataggtaagaaaattttatttttgggttcttctgttacttttggttttggcgctttgggtgaaagctttgttgattatctttggaagcgtgatggcgttgctgcaattaaagatgcagaaaatggtacgaccttagttgatgaagatacttataagccaaacgattcttatgttgctcgttttagagaagagctgaccgaatcacaacctgatgtttttgtcttacaactttcaactaatgatgcaaatcaaaataaaaaactaggcaaaattactaatcaaaactttgacaccaaaaccattacgggagctttggaatatatgatttcaacggctcaagcaaggtggaaatgtccaattttaatttatactaatccttattttgctaatccgttatacaaacagatggttgaacgagtacacgaactggctcaaaagtgtcacgttgagattctagatttatacgatcatcctgattttcagcatcaagacgctttgtatatggctgatgaaattcatccaactcgtgcgggttatctaaagaaatggttaccattatttgaagaaaaaataactgaaattttggcataaagaaagacctagataaattatctaggtcaaaattgaaattagtcaatgttattacgatacaagctaactaccttacccaaaattgtaactttaggtaaaatgattggagccattgtatcattttctggctgtaatcggtagtgatccttttctttgtagaaacgcttaactgtagcttcattttcttcagtcattgccaccacgatttcaccattgttggcagatgattgtttgcgtacgattacgctatcaccgtttaaaatgccagcgttaatcatactttcaccgtggactttgagcataaagagttcaccagcatcactttttaagtctggtgggagtggaaagtagtcatcaatatcttcaactgccagaattggttgtcctgcagtaaccacaccgataactggaatttcctttggcttgatacctaactcttttttaccttcacgggtaatttccaaagcacgaggttttgtagcgtcttttactagccagccctttctttcaaggcgagctaaatgaccatggacagtggaagtagaagaaagaccaactgcagaacagatttctctaactgtaggtggaatgctccgtttctcaactgtatcgtaaatatattgcaaaatttctagttgctttttatcgcttgtttttcttggcatttttaattctccgtttgtatttatggtacttaatattataacctaattctaccagataatgtcaatattatcaaacaggcgttcttaagaagttatactttttttatgacataaaatagggtagactaatgagtgttaatgtgaggtggaattattatggataataaagatgcaatgagcaaagaagaagaaaaaaaggtaactgatcgaatcaacgaactttaccataagaaagaaaaggaaggcttaactccagaggaagaagctgaaagaaaagaactacataagaaatttttagctaactttagagctgcctttaagcaagatgttgaaaacatggtcatcttagacaagaatggcaaggaagttacctcagaacgtgccaagcgagcacaaagaagaaaaggacttagaaaagattaattagttctttcaaaaagttagagaactatgataagatataaatgttagttagatggaggatttaatatgaatttaggtttagcaatttttttaattatcattgcgctcttgattggcgctgtagcaggtttttacggtgcaagagcttacatgaagaagtactttaaggaaaatcctcctattagtgaagatatgatcgttgctatgatgtcccaaatgggtcaaaagccttcaaataagaaggtacatcaagtaatgaacatgatgaagcaccaacaaaagtaattaatttaattagttttgttagaaaaggcgaaggatttccttcgtcttttttgtgcacttttaagaatgaggtgaaatatgggaatatttagtaagttagggtggttttttaaggctgagaaaaaacgttatatcataggcattacctttttggcgttaacttctttagctaacttggtaccgccccgtgtattaggcttaatggccgatcaattggatcaaggtcacatctcttggggacaatatggaatgttgatcattgctgtcgtggccgctgcattcacactttatattttgcgctatttttggcgtaaacaaatttggggcggcgcagcagaattagagcgccaaatgcgttcaaagttatttgatcattttatggtgatggatcggactttttatcagcgtcatcgaaccggagatttaatggctcatgctactaatgacgtttctgccattcagaacgttgctggtgatggcgttttaacattggttgattctttagttatgggactttcaacaatgattgccatgatcatttttgttgattggcgtttaactattgtagctttattaccattaccgtttttggcattgggagcttggaaattaggtgatcacttacatgatgcttttgataagtcacaggctgcattctctaagctgaataataaaactcaggaatctgtatctgggattaaggtgctcaaaacttttggtcaagggaaagaagatactgctgcttttgacaagatggtcgatgaaacgatcaatattaataaaaaagtttttgtctgggattccttatttgatccactgggaacaataattatcggtactacgtatgtgatcacgattatttatgggggactattagtaactaacaagattttatcaattggccagttggtttcttttatcgcgtatatttctaacatggtttggccaatgtttgctattggttatttgtttaatattctagagcgtggtagtgcaagttatgaccgtgtagaaaagttacttgatgaaaggcctttgattactgatgcacatgcagatccaaatattacttctcaagatttgcaaggtgaattaaaatatgacattaaatcatttgcatatccagatgagccagatattccagttttaaagcaagtcaatttcactttaaaacctgggcaaactttagggttagttggtcgagttggtgcgggtaaaaccacaattattcaactgcttttgcgagaatttgatcagtatgatggtcaaattactctgaatggaaaagatattagaaatattcaactaaaggtattactcagtcagatctcctacgttcctcaaaataatttcttgttttcaactagtatcggcaaaaatattgctttctcttctgaaaatgtagataaggatgatattgcagctgcagccaagaagagtgatttgcatgatgatgttttgcaaatgcctaaaggctatgaaactttagttggcgaaaatggcttatctctttctggtggtcaaagacagagaatgtcaattgctcgggcattgctaaaagatagtcagattttgattttagatgatgcattgtcagcagttgacgcaaagaccgaaactgagattttgtcatcattaagaaaagagagagctgataaaactacaatgatcgcggctcaccgtttgacttccgtgatggatgctgatttgattttggttctaaaggatggtcaaatcgttgaacgtggtaatcatcaacaactattagctgcagatggatggtatgcggaaatgtggcgtagacaggaattacaagcgaaagtaggtgaagatacagatgaataataacgaagaacagcatgaatctgtttggtctaaggcgataccatttaaagagcaagttgatatttttaagcgtttaatgggctttgttaagcaatttaaatttgaaatgattgttgctttagttggtgcatttattgttagtgtaattaatattcttttgccacgtggcttgcaatatttcttagatcactttctattgcatcaaagcacaacagtgcaggtgattttgtttgcaggttttctttatgctttaggctcaattttaaaggcaataattcagtttacttaccaatatttctttgctttaggatcagaaaaaacgctagagagtgtcagaagggcattgtaccgcaaactgcataagctagggatgcgctattttgatcaaactcctgcgggctcaattgtttctagagttactaatgatacgatgactttgagtaattttttgacggtgctatcaacttttgtgattggtgctttttcggtgattactgcgttagtagcgatgtttactactaatatagttgctgggtggttgattttactctttattccgattttattattagttgtttggctttattcgcaaaaaagctcacgtctttatcgtaattatcgtgagcgtcttagtcgaattaacgctaacttaaatgaatcaattgaaggagtatcggttatccaagaatttaatcaagaaaaacggatgactaataattttgaaggcgaaaatggtggtttaatgaatacacgcttcaacatgatccgagtaaattcattgttattatcgccattgacatcgctgctttattcgttagctttagccatttcattaatgtactttggttttccattacgtgaaacttttgttccagctggtgtagtctatgccttttcacaatacatttcgcaactttttaatcctatttcaactgtgatggatcaaatgacctttttccaagatgggattgttgcaggaaagcggatttttcggattcttgatgatacccaatatgaaccacagcaggatgctcaaaaaggattgacgattactaaaggaaaaattgagtttaaacatgtaagcttttcttatgatggcaagcatgaaattttacatgatatttctttcgtagttaatccaggtgaaactttaggaattgttggtcatactgggtcagggaagagctcgattattaacgtgatgatgcgtttttacgaattcggtcaaggtgaaatcttgattgatgacgttaatattcgtaaatatcctaaagaagaattaagaaaaaaacttggcttggtattgcaagaaccgtttatgttttatggagatatttcatctaacattcgtttgtataataatcaaattactgataatcagattaaagacgccgctaaggcagtccaagcggatcgctttattgaaagaatgccgggtaagtatcatgctaaagtgattgaaggcggagaagaatttagtcagggacaaagacagttaatttctttcgctcgaactttagtcacagatcctaagattttggttttagatgaggcaacagcaaatgttgataccgagactgaaactttgattcagcaaggactaaagcggctgagaaagggtcgaacgacattagctattgctcaccgtctttctacgattgccgatgcggatcaaattattgttttagacaagggacgcataattgaacggggtacgcatgatcaattgcttgcacaaaagggttattactataatttgtataccttgcaaaataatgaaaataaaaactaattgtttttcaggacgtttgtgtagtagcaacgtctttttttgatataatagttaaaaagtattaaataattatgaatatttataaggagcaaaaatgaaaagatattttacagttcgtggtggagctggcgacgtttctaagccagacttaaatgctaagccacaagataacttatacttggctgttaactcagaatggctatctaaagcagaaattcctgctgataagacatctgctggtgtcaattcagagcttgaccaaaaaatcgaagatcgagtaatgaaagactttgcggacattgcggcgggcaaagaaaagatgcctgagattaaagactttgataaggcagttattttgtataagattgcaaaagattttgctaagagggatgcagaaaaagctaatcctattcaaaaggatttacaaaaattaatatccttaaataattttaatgattttaaacaaaaagctgccgatttgtttatgggaccatatgctttaccgtttgtatttgacgtcgatgccgatatgaagaacactgatgtaaacgtactccattttggtggcccaagcacattcttaccagatactacgacgtatcaaactgctgatgctaagcaacttttggatactcttcaagaccaaagtattaacttactgacaatgtccggtattggtaaaagcgaagcacgagtttatgttgaaagcgctttggcctttgatcaaaaattagctaaggtagttaagtcaactgaggaatggtcagattatgccgcaatttataatccagtaacatatgctgactttattaaaaaatttaaatcatttgacatggctgatttcatggattctattttaccggttaagccagatcgaattatcgttatggaaccacgttttctcaatcatgctgaagaattattgaatgaagggaattttgctgagattaaaggatggatgctagttaaatacattaacagcgtagctaaattattgtcacaagattttcgtgaagctgcgtttccttttggtcaagcagttactggtacgccacaattgccatcacaaattaagcaagcttatcgtttggctaatggtgcttttgatgaagtagttggtatcttttatggacaaaaatattttggggcaaaagccaaaaaagatgttgaagacatgatccaacggatgcttaaggtatatgaagaaagaattaatgctaataaatggctttctgctgaaaccaaaaagaaagctgtgattaagttaaaggcgttggttttaaaaattggttacccagacaagatcgaagaaatctttgacttattacaagttgatccgaaaaagagcttgtatgaaaatgaagcggcaatgtcaactgtacgaacgaaatatatgcttaataagttaactaagccagttgaccgttcagtttggctaatgccaggtaatttgaataatgcgtgctatgatccgcaaagaaatgacttaacctttccagctggaattttacaggcaccattttatgacattaatcaatctcgtggtgcaaattatggtggaattggtgcaactattgggcatgaagtatcacatgcatttgataatagtggagcaaaattcgacgaacatggaaatatgaacaattggtggactgacaaagattttgctgagtttaataaacgagttggtcaaatggttgatatttttgatggcttacaatatggtcctgctaagattaatggtaagcaggttgttggtgaaaatattgctgatctagctggccttgcttgtgtagttcaaactggggaaaatgatggggcggatttgaaagatttgtttgagaattatgctcgtagctggatgcagaaacaacgccctgaggcaattaagactgaagttcaaacggatgtccatgcgccacaaccaacgagagtaaacattccggttcaatgtcaaaatgcattctatgatgtatttaacgttaagccaactgatggcatgtggcttgatccagaagaacggattactatttggtaaaattgaataaaaaaatagtcactggatttcaatttctagtgactatttttgatatgtaattatttatcaagcatatatttacgagtcatcggtaaagttttacctgatggtccctttgtcaataggtattggataacgtcgatgttaccagactcgaaactagcagcacaagcattaaggtacatatcccacattctacagaatctttcaccaaatttcttttctacttcaggacgaacggcattaaagttcttatcccaaatttccaaggttctttgataatgacgacgaagagtttccatatcagtaatttgtaggcctgaatcgatgatgtcagtaacaatttctggtaagcctggtaagtagccaccagggaaaatatacttgtttaaccaagcattagtggcaccaccttgttgacgggtaataccatggattaatgcaacaccgtctttgttaaggtacttgtagacatcagcaaagtatttaggtaagttttctttaccaacatgttcaaacattcccactgaagtaatgtaatcccatttttgatcaccaagttcacggtggtcttgtaatctaacttttgcgacatcttgtaagttatcgtcgtagattcgcttttgaactaatttaaattgctcctcacttaaggtaacaccggtgacttttaaaccgtattccttagctgcagtaagcatcagagttccccagccacatccgatatcaagtagggtcttgcctttttgtgggtggagtttgtttaagatatgatgtacttttgcaatttgagcttgttcaagatcatctttattgccatcttcgaagtgggcgcaggaataggtcattgttgggtcaagccacatcttgtagaaatcattaccaatgtcgtagtggctttgaatatcttcttcgctttgcttttccgtgtgtttttgcttaggcataaacttacggaacttagaagcacgcatgaatgaatcagcactttcataagcaccaacaagcaatttttggatattaccatgaatttcgatttttttatccatgaatccttcgcccaaagctagagaagcatttcgagtgatttcactcattggaatcttttcattaaaaacaatttcaatttcaggatcaccattgccataaacttcgctcttaccgtcccagtaggttaccttaacagaaaaggggaaagatttactaagcatcattttgtaaaaagttttttctaacaattgctttttcctccaatatttaaaacctaaaaattattttaacacttatattaaattgcacaggtaaagaaaaatcagtataaagcaatatttgttttatactgatttttacttatttagcaacgtagtggaaatttggatccatttccttatctaatttgttccaagcatcttcaagttgttgaaataaaatttgttcattttcatgggttagtttagttttacgatcaatggtaattggatcaccaaagttaacttctaatggcttgcgcttaagcagtcctttaaaagttaaagggccttggtagacaacaggtaccattggtttttttgacattttggaaattaataaaactccaccttttaattcagctgaatgtcgcgtgcctgaaggaaagataattaatgataactttccttctctaagtcccttaactggaatctttaaggctgatggtccagggttatttcgatcgactgggaaagcgtgagcatgatcaagaataaatcgtaaaaccggatttttgaataattcaattttagccataaacatgaattccattggactagcacctagtgcaaaaagcagtggttcccaccatgtacggtggggggctactaaaatataattgccctgaggcaagcgatccttatgatgaatgtgtagatgaccgtttaacacccaaacgatgaaacggacaatcggacgtataattttgtaaaacattgtctcctcattgattccttcatttgatgtaagctattataaaaatataatgacgagaaaggcaaatatttttatggtagatctgaaagataatgagcgaattgactacatgtatagcgataatcttcgtattattcaagataaaacggcttttagtttttcaatggatacattatttttagcatattgggctaaagacttgatccgtgataaagataaggttgctgatttatgtgcaggaaattgtgcagctacaatctatatggcttattttaatcgtgcccattatgatgcaattgaaattcaaaacgaagtttattctcaagcagttcgttcagtcaagcttaatgagatggaaaatcgtatttcagtttttcaggataatgtgctaaatgcaggacattttttgcggaaagatagttatgatgtagtaacagttaatccaccatattttaaagcacctaagggacatgaagttaatccagatcgtaaaaaagcaattgctcgccatgaacttttgattaatttagagcaaataattgaagtggctagtggcttacttaaaatgaaaggcaaaatgttaatggtacatcggccagagcgcttaggtgagattgcttattattgtatgaagcatgacttaagcatcaaaatggtgcagccatttgtgccacatcgcggtgaagatgctaatttaattattgtagaagccgtcaagcatactggaactgatggaactgttttgaaagatgctgttgaagttcatgaatcaaatggcgacttcactccattagtacagcgaatctcacgagaaactgcagatgacaaagctaaacatgaagcacagggtaaatattacttttatgtcttactgtgtaatgatggcagtttttatggtggttttactaatgatttagaacatcgtttgaaaatgcacaatttaggaaaaggagctaagtatactaaaacacggcgtcctgtacggatgatttatcatgaacagtttgacgataagcgtttagctttgaaacgagaatattggtttaaacatcattcacgtgcttggaaggaaaaatttttgcatgagcataatataaagttttaatccttgcatactgtaatcttttcttgtagaatatttgagtatgctgtgtcagcatatgaaacttaaaacacatcaagagcaatcatcatcgtggtgcccagggtagtggttagatgatgaaatgaacgcttgagaggatataaaaccataggaggaatttaaatatggcagacgttgttacaatgaagcaattgcttgaagctggtgtccactttggtcaccaaactagaagatggaacccaaagatggctccttacattttcactcaaagaaatggtatctacatcattgatttgcaaaagactatcaagatgttagatgatgcttacaactttatgaaggctgttgcccaagacggtggcgttttcttatttgtaggtactaagaagcaagctcaagattcaattgctgaagaagcaactcgtgcaggtcaatactacgtaaaccaacgttggttgggtggtactttgactaactggtcaactatgcaaagccgtattaagagattaaagcaattaaagcaaatgtcagaagatggtacttttgatgttcttccaaagaaggaagttgctctcttaactaaggaaatggacaagcttgaaaaattctttggtggtattgaagatatgccaagaattccagatgtattgttcgtagtagaccctaagaaagaaaagattgctgttcacgaagctaacattttgggtatcccagttgtagctatggttgataccaacactgatccagacccaatcgacgtagttattccatcaaacgatgacgctattcgtgctattcgtttgattgctggtgctatggctgatgctgttgttgaaggtcaacaaggtcaagatgatgaatcagttgaagttgacttcaaggaaaatgcagacggttcagaagaaatcgttagcgctgaagaaaacccagaagactagattttactattagttccgtaggaggatctattaatggcacaaattactgcaaaattagttaaagaattacgtgaacgtactggtgctggcgttatggacgctaagaaggcattagtagaagttgacggtgacatggataaggctgttcaataccttcgtgataaaggtatggctaaggcagctaagaaggctgaccgtgttgcagctgaaggtttaactggcgtttacgttaatggtaatgtggcagctattactgaagttaactcagaaactgactttgtttctcaaaacgacaagtttgttaacttggtaaatgaagctactaagactattgctgaaggtaagccagctgatatggaagcagctaaggaattgaagatggctgatggtactactttagaccaatcattcgttaacgcaactgctacaattggtgaaaagattgttttacgtcgttttgctttagaagaaaagaatgacgaccaagaatttggtgcttaccaacacaatggtggccaaattggtgttatcactgttttagaaggtgcagatgctgcaactgctaagcacttggctatgcacatcgctgctatgagccctaaggttatttcaccagacgaattagatgatcaatttatcactgatcaattagctgtgatgaaccacaagattgaccaagacaatgaaagtcgtgcattggtacataagaaaccattacctcaccttgtttacggttcagctaagcaattaactgatgatgttttggctaaggctaaggaagacatcaaggctgaacttaaagaagaaggtaagccagaaaagatttgggacagaattattcctggtaagatgcaacgctttattgatgataatactcaagttgacaagcaatttgcagtgttatcacaagactacattatggacgatagcaagactgttggcgaatttttgaaggaaaaaggcgctaagttagttgctttccaacgttacgaagttggcgaaggtatcgaaaagaagcaagaagacttcgctgctgaagttcgtgaacaaatgaagtagtcattattacataattatcatagaaaggaggagtacaccgtgtgctccttctttttttgtaaaaattttgtagtgttttaagtgttaaaagacattgcggcattagatatggtagaataattaaagctattagaggaggtcattatgagtcaagttaaatataaacgtgtcattttaaaaatatcaggtgaagctttagcaggtgacaagggtacggggattaatcctactgtaattggtcacttagctaaagaaatcaaatcagttcatgatttaggtgttgaaattggtatcgtctgtggtggcggtaacatgtggcgtggtgaaactggcgctaagttgggtatggaacgtgctcaagcagattacatgggtatgttagcaactatcatgaatggtttagctttgcaagatggtcttgaaaaaataggtgttcctactagaatgcaaacttcaattgaaatgagacagattgcggagccttacattagaagaagagctttgcgtcaccttgaaaagggtcgtgtagtcatttttggtggtggtactggtaatccatacttctcaactgatactactgcagcccttcgtgcagctgaaattggtgctgatgtaattttgatggctaaaaacggtgttgacggtgtttactcagctgatccaaagactgatccttcagcaactaagttctcagaattaactcaacttgatttaatttcaaaagacttgaaggtcatggatagaactgcaagttcactttcaatggatactgaaattccattaattgtctttaacgttaatactccaggcaatatcaagaaggttgtattgggtgaaaatattggtactgttattagaggtgataaataatgaataacgaaactattgaaaaagcaaaaactaaaatgacggattctattaaggtttatcaaaagagattagcttctatccgtgcaggtgttgctaacgctgctcttcttgataatgtccaagtagaatactatggggcaccaactccattgactcaaatgtctagtattaccattcctgaaccacgtgtattgcttattactccatatgatcaaaattcattagatgatattgaacatgcattgttggcttcaaacttaggattaactccggcaaatgatggtaaggtaattagattagtaatccctcaactcactggtgaaagaagagaagaaattgccaaagaagttggaaaatttgcggaagaagctaaaattgctgtgagaaatgttcgccgtgatgccatgaatactttgaaaaaagatgaaaagaatggtgatattactgaagacgaacaacgtaacttagaaaagcaagtacaaaaagtaactgatgatgctgctaagcagattgaccaacttgctgatgaaaagcgtaaggaaattactcaaggttaaagatgagtaataaggataatgaattaaatcatttagccattattatggatggtaatggacgttgggcaaaaaagaggcatagacctcgttttgttggccatcgagagggaatggataatgttgagcggattactttagctgctgataaattaggaattaaagttttgacactttatgctttttctactgagaattgggctcgtcctaaagaagaagtagcttacttaatgaacctccctgttcgcttttttgataaatacatgccaacattgatggaaaataatgttaaggtaaatatcatgggctatttggatgaattgcctgaaaagacttatcgcattgttcaacgtgcaatgtcagagacggccaataatacaggcttaattctgaattttgcttttaactacgggtcaagaagagaaattacgtctgctatgcaggagctcggtggaatgattgaagctggttcactaaaaagcgaagaaattactgaaaaaatgatttcagaccatttgatgactaaaaactttggtccatatcaagatccggatttattaattagaacgtccggtgaacagcgaatttctaatttcttattatggcaattagcatattcagaacttgcctttagcgaaaaaaattggccagattttgatgaaaatgatttaaaaaaatttgtagaagattataagcaccgtaaccggcgctttggtaaagtagacgaatcggatagttaaatatgaaacaacgtacaattacggcaattattgccttatgtctttttattccaattgtgctcgcaggtggcctttggatggattggctgactgtattattcgcagcagttggcattagcgaaatctttttaatgaagaaacaaatcttagtttcttttaattttttgttagccttacttgcaactttaacctggacagttccagactcattctttaaagtatttccttcaaatatcactaaattaggtgtgttttatggaattattatgttgttcttgacctggactgttctttcaaagaataaaaccacttttgatgatgtaggtgtatatattttggctgcactttacattggaataggttttcactatatggcagccattagagcatacccacaaaacggtttagcattgctgggttgtgtttttgttgttgtttggtccactgatatcggtgcctacatgattggacgtaagattggaaaacataaattatggccagttattagtcctaataaaacatgggagggctcgatcggtgcagttgtttgtgccttaatttgtagtgccatctatatggcaattcttggcagcttgggtattaactttggtgtatctgaattaacgatgattattctggcctttttcttatcaattgttggtcaaatgggtgatttagttgaatcagcttacaagcgtttctatggtgtgaaagattccggaaagattttgccgggtcatggtggtatcctggatcgctttgatagtatgctgtttgtattgccagtagtggctacaattttaggtattgttcattaggagaattttttattgaagggtatactaatctttatcgtcgtctttggtatattggtatttgtccatgaatttgggcattttatcgtagccaaaaagtcaggtattttggttagagaattctcaattggaatgggtccaaagctttttcaaattagacgtaaccccaccacttataccattcgttggttaccacttggtgggtatgttcgtttagcaggcgctgacgatgaaagcaagctggatcctggtatgacggttgttttacaattgaatgaacaaaatgaagtagtgagaattgatgcttcagaaagcgaaataccaattgaaggaattcccgttcaagtaacaaaggctgatctagtagacgatttaataattaagggttacgaaaatggcgatgaaaatgatccagtaacttatcacgtagctcatgatgcaactattattgaaaaaaacggaactgaattaattattgcgcctcgagatacacaatttaatcaagctaatgtttggcaaaagttggcaactaattttgctggaccttttatgaacattcttcttgggtttgtagtatttttaatctggacatttacagttccaggtccagcaacaactacagttggatcaactcaggctaattcaccagcgcgtgatgcaaaaattgtgactggtgatcagattgtggcaattaatggacaaaagattaataattttgatcaagtgtcacagcagattaatcaaagtaaaggcaaggtcttacactttgaattaaagaaaaatggtcaaattaggaaagttacagttaagccaaaagctcataaaattcaaaaacaaacagtttatcaaattggtattgtagctaagagcaatgagaatgcagttgttaaattaaaacgtggctgggatacagctatttcaactaccggtctgattttcagagccgtaggtaacttatttagccactttagtttgaataaattatcaggtccagttggaatttattctcaaacttcacaagtttcacaaatgggctttacttatgtattagcctttttaggaatgatttcgattaatttgggaattgtcaatttaattccaattcctgggcttgatggtggtaaacttttattgaacttaattgaattagttcgcggtaaaccgatttctgaagaacatgaggcaattgttgaattaattggtttcggcttattattagttttaattattgcagttacaggtaacgatatctatcgctattttattaaataattatattttttactttaggagataagaatgcgtcaatcaaaattttttatgccaactttgaaggaagcaccatcagatgcagtggctgaaagtcataagctgatgattagaggtgggtatattcgtcaagtcacagctggagtttatgcttatcttccattaggctaccgtgttttacgcaaggctgagggaatcattgaacaagaaatggataaaattaatgttccagaaatgattatgcctcatttacttcctgcaactttgtggcaagaaagtggccgttacaagaaatatggtgcagaaatgttcaagttaaaagatcgtcatggacgtgaaagcttgcttggacctacacatgaagaaacttttaccgaaattattgctaagaacttaaagagttacaaacaaatgccacttgctttgtatcaaattcagactaagtttcgtgatgagaatagacctcgttttggccttcttcgtgggcgtgaatttgtaatgcttgatggttacagttttgctgcaactcgtgatcaattggatgaacaatttgatgatcaaaaaaatgcatataagcgtatctttaaacgtgccggtgttactgttcaccctgtaattgctgactcaggtacaatgggaggtaaaaactctactgaatttcaagcccctgctgctatcggtgaggatacaattgctactaatgaaaaaggaacatatgctgccaaccttgaaatggctaagagtattgatactttcaagcaagaaccagaagatgctaagcaattaactaaggtagctacgccaggctgcgatacaattgaaaaattagctaaattcctcgatgtaccagctactagaattgttaaaagtattttatacattgctgatgaccaaaaagttttagtattaatccgtggtgacaagcaaattaatgaggttaagttgggtcatatccttgacgctgatgaggttcatgaagcaaatactgctgatttaaaggaaatcactggtagtgaaaagggtggcgttggtcctgttaatgcagattgggctgataagattattgcagatgaaactgttaagaatctttacaacgttgtagttggtgcaggtgaaaccgattatcaatttgaaaatgctaacttagaccgtgatttcaaggtggatgaatttgctgatattcggactgctaacgaaggtgaaccagatcctgttgatcatttaccgcttaagttcactacttcaattgaagttggtcacattttcaagttgggtacttattacactaagaccatgggtgcagatttcttagatcaaaatggtaaagcaaagcctgtcatcatgggttcatacggtattggcgttactagaatgttatcagcagctgttgaacaacacttaactgaacgtggtgttgcatggccaaaggaaatcgctccatttgcaatacatattgttcaaatgaagatgaataaagaagatcaaactgaattagctgaaaaacttgaaaagaaattcagtgaaaagtatgatgttttatacgatgatcgtaaagagcgtgctggtgttaagtttgctgatgcagatttagtcggtgcaccaattagaattacgattggtaagaaggctgctgatggcattgttgaagttaagcgaccaactgatgacaaagcaaccgaaatgtcaattgatgaattagataagtttgtaaatcaagagttaggataatttttgtggcaaataaaaacgatcttttcttaaaattgctcaaacaggttcaatttcctgatagttttgaagacaatgcgcttctacaaaaagggaaaattgaaaacgtggatgtttacgctaaagaacacaggtgggatatccacgttttttttgatactcccttgatgtatgacacctatgtagcattaagaaaagctgtagaagaaactttttcttcttttgtaaatgtaagattttatgttggaacagctgatggttctgatcaatatttaccagattattggcattatgtagttcaaaattcaaatattttgcaacctgtggctcgtgaatttttggctggccaaaaacctaaaaaagttgatggccgctgggttattccagttgataataatgtgattgatggtttaattgagcagaaggctttagatgatttagctgaaaagatgcgtgattatggcttctttaatttgaaatttataactcagctggatcagacaagttctaaaaacaatttagaaagtttgcaggagttgcaacaagagcatgaaaaaagcatgcaggaagtctttgagaagacgccagacaaacctaaaccgcaacaacctaaacagtatccaactagacgtactaattatggtaaacgtaaattagatgaaaatgctccaattacacaaattaaagagctggaagatggcgtacgtaatgtagtaattgagggaaatatttttaatgttgaaactcgtgagcttaaatctggtgcaatcattttttctggcgaaattacggattatagtgattcaattgcatttaagaaatttgtttctaataaagatgaaattgaagagctatctgcaattaaaccaggaacttgggctaaaatgcaggggtcagttgctgatgatcaatatatacatgatgtagtttttaatattagtagcttagagactgtcgagcatgttgggcgaactgaaaaatacgaaggtgagcctaaacgagttgaactacatgttcatactaatatgagtcaggttgacgcaactaatactccgacggactttattaaaactgctaagaagtttggacaaaaggcaattgcgattaccgatcatggtgatgttcaatcattccctgaagcatatagcagtggtaaagcactggacatgaaaatattgtatggtgtagaagctaatatgattgatgatcatgctttactagttttgaatcctgcaccgatgacctatgaagaccgcgagtttgtaatttttgacgttgaaactacggggttgtcatctgtttacgacacaattatcgagattggtgcggttaagatgaagaacggagaagtgcttgaacgctttgataagttcattaatccgcaccatcctttaagtgagcaaactattaatttgacttcaattacagatgaaatggttggcgcagccgatgatgaagcagttgtcattaagcaattccaagacttttatggcgatcgaccactgtgtggacataacgttcaatttgatgttgggtttgttaatgcagcattaagacgtgcagggctaaaagaaattactcagccagtagttgatacacttgaagtatcgcgtttactacatccagagcagagtcgccatactttagattcattagctaagaagtataatgtttccttggaacaccatcaccgggcaaatcaggatgctgaagcaactggctatttaatgtttaaattgttagatgcttttaataaaaagtatcatgaaaataatttgaataatttgaatggctatgcagcacatggtgaagtttataaacgagcccgtccttcccatatgacagttttggcaaaggatcaagctggattaaagaatctttacaaattagtatcaattgccagcacgaaggactttttccgtattcctcgtacgccgaagtcagatttggctcgtttgcatgatggtttactttatggttctggttgttggcaaggcgatgtctttatcgcaatgatgcaaaaaggttacgacgaagcaagagaaaaagctaaattttatgattatcttgaagttcaacctccagcaacctattcgcaattaattgctgatggtttgattaaggatgaagatcaattacatgaaattattgaaaatattattaaattagggaaggaattaaataagcctgtagttgcaactagcgatgcccactacgttgaccaaaaggacgctatttatcgtaaaatcttgattgcggctcagagatcaaaccctagtcgaaataagccacagccagatttgcatttctattcaacacaggaaatgctagatgcattttcattcttaggcgaagatgtggctaagaaaattgttattgacaataccaataaaattgctgatgaattgtcagaaattcagccaattaaagatgggttatacccaccacatattgaacatgccgatgaagaaatgaagaagttgacctatgataaggcttatgaattatatggtaagccattaccgaagattgttaaggatcgaatagatttggaattaaattccattatttcgaatggttatgcggttatttacttgatttctcagcgtttagtagctaagtcaaataaagatggctatttggtaggttctcgtggttctgttggctctagtctagtagcaacgatgtcaggaattactgaagttaatccgttagctccacactatcgttgtcctaactgtaagtattcacaattctttgaaaatggggaatatggttctggttttgacttgcctgataaagattgtccaaaatgtggaactccattagttaaagatggacaagatatcccatttgcgactttcttaggatttcacggcgataaggttcctgatatcgatttgaacttctcaggtgactatcaaccagtagcccataattttattcgagtaatgtttggaccagataattcatatcgtgctggaacgattgcgactgttgcggataagactgcttacggttatgctaaacactacgatgaagagcatgatttaaagctaagaaatgcggaattagaccgtttggcagctggtgtccgtggtgtcaaaagaactactggtcaacaccctgcaggaattgttgtagtgcccgatgatatggacatttacgattttacgccggtatcgtatccagccgatgatgtaaatgccgcttggttgattactcactatgacttccactctattcatgataatattttgaagtttgatattctgggacatgatgatccaactatgattcgtcacttgcaggatttgtctgggattgatccattgactattccacccgatgaccctggagtcatgtcattattttctagtcctgatattttaggtgttactccagagcagattcaatcagaaactggaactttgggtgttccagaatttggtacccgttttgttagaggaatgcttgaggagactaagccaacgacattttctgaattattacagatttcaggtttgtcccatgggactgatgtatggctaggaaatgctgaggacttaatcaatcaaggaatttgcaaactgaaaaatgtaattggttgtcgtgacaacatcatgatggacttaattcactggggcgttaagccagaagttgccttttcaacaatggaatccgttcgtcatggtcgtggcatcagcgatgaaaatatggctattttaaagaaaaataagaatattccagattggtatattccttcttgtctgaagatcaagtacatgttccctaaggctcacgctacggcttacattttaatggctctacgaattgcttggtttaaagtatattatcctgaaatctattacacagcttacttttcagttcgtgccgatctatttgatttggttgcaatgagtcatggtaagaatactgttaaggctgcaatgaaggaaattcaggataaaggaaacgatgcatcagctaaggataagagtttgatgaccgtgctagaaatagctaatgaatgtctagaacgagggattaagatcaaaatggttgatattgatcaatctgaagcaactgactttaagatcttagataagcatacaattttagcaccgttcaatgctgttcctggtttgggggataatgcagctaagcagattgtagctgctcgtgcagaaaagaagtttttgtctaaagaagatttagctaagcgcggtaaagtatcacaaacaattatgaattatttcgaagaaaatggtgtcttggaagggatgccagatgaaaatcaattatcacttttctgatagttaaattttacaagatcaggtaaaacatggtatactacgtatgaagttcgaataggtaaattcgagtgagcagtgatgctcactctttttattacggaggaaaatttttgtctaaagttatagattctgttcgtccagttgtcgaaacaattattgatgaacatggtgacatgttggttgatatggaatacgttaaagaaaaagggcaaaattatttacgcatttatgttgatcgccaaccaaacggtattgacattgatgagattgcagctttaagtgaacttgtttccgaaaagctggatgctcttgatcccgatccacttccagatccctatgttttggaattatcatctccaggggcagaacgaccaatcaaaacaaaagctgattgggaaaaagctctgaatgattacattcatgtcggtctttatcaaaagattgagaataaaaaaatgtatgaaggtacactcaagtcttataatgatgacgaagttgtattagaaataaaagataagacaagacgaaaaacattaactgttccccgtaagttaattgcaaatattcgttttgcaattgaattttagaaaggttgatcaaaaacttatgtctaaagaaatgctagaagcgtttgctactttggaaaataccaagggcattaagcaagatattattgttgatgcaattaaagccgctttggtagctgcatacaaaaagaattataatcaagcacaaaacgttgaagttgattttgatgaaagaaaaggtaacttcaaggtaatggcagttaaaactgttgttgacgaagtgcaagatgaccgtcttgaagttagtttaaaggatgctttaacaattaatcgtgcttatgaagtaggcgacgaaattcgttttgaagtaacacctaaaaattttggtagaattgccgcccaaactgctaagcaagttatcatgcaacgtctacgtgaagccgaaagaaaacatattattgatgaatattcacaatatgaagatgaattggttactggtaccgtggaaagacgcgacaatcgtttcgtttatgtaaagattggtaatgttgaagctgttatgcctcaccgtgatcaaatgccaaatgaggtttacaatccccaagaccagattcgtgtactagtaactcatgttggctccgatagcaagggtgcacaaattacagtctcaagaactgctcctgacatggttaaacgattgtttgaacaagaagttccagaaatttatgatggaaccgttgaaattgtttcaatcgcacgtgaagcaggtgacagaactaagatggctgttaagtcaaatgatcctaacatcgatccggtaggtacctgtgtaggccaaaagggtgctcgtgtacaaaatgtagttaacgaacttggcggtgaaaatattgatatcgttaagtatgaagaagatccatctgactttattgctaatgcattaaatccagcagaagtgattgcggttcaatttggtgatgatgaagaagaaaaaagtgctttagttatcgtaccagattaccagttatcacttgcaattggtaagaaaggtcagaacgttcgcttagctgctcgtttgacaagctataagattgatattcgtcctgaatctgaagtagaatttgtagatgaaaaaacaaatgatacagctgatgctgcagatagtagcgaaacttctgaaaatgttgaaagtacagatgacgctgctgacgttgaaggctcagatgatacaactactgtagaagattcaagtaaagaagataaaactgaagaataggtgattttttgaaaaaaagaaaaatcccaatgcggaaggatttattaaccgatacaatgcagcccaagaaggaattagtacgtattgttatcgataaagaaaaaaatgtgtcagttgatccaacaggtaaaaaggctggtcgcggcgcatatgtttcccttgatccaagtaagattgaagctgctaaagagaagaatgtattagaacgtagtttaggtgcgaaagttccagatactttttacgatgagctttactcttatgttgatcatcaaaaggcaagaaaagaattatttggtgataaataagattgcaaaatagacaaaaagcaattaatttgttaggtttagctgagcgtgctggtaagttaactaccggtacagagacagtcattaatgaacttaataagcacaaaatcaaagcggttattatggctagtgatgttcaagacaacacggcagaaaaagtaaaccgcgctgccagaaaagacaatattcctatgataactatgtttactgccattgaattgtcaaaggcaattggcaaaaaacgcaaagttttaggattaactgatgctggttttgctaaggcgttagttaaaaaaataaatgaaggagtgtgattggatggcaaagaaaagaatttatgaaatcgcaaaagaagtcggcgttgataacaaagttgtagtccaaaaagcaaaggatttaggcttagatgtaaagaatcacatgtcatcagtagatgattcacaggttgcaaagttaaagaatagtttccaaaactccgctcctgctgcaaaatcttctaataaaaagaataaaataaaaatctctgtttcttctattcgcaaaaatgaaaagaagcaagaagataataatagttctaagaattctaagagacgcaataataaacgtcgttcaaataatcacggtcatgagaataaaaatgatcgtagaaataatacaggtaagccaaaggcagctgctttgttacaacaatttaaacaaaagcaacgggcagaagaagggcaacttaatcgtgaagcccaaaaagccagaaaagaatatcatgagcaattaagacatccaaaacaagaacagccagtgaaagataataagaaaacaagcaaccacaaagataacaagaagaaagcagaaccagtagaaaagaaagttattggtcctaagattttaaagccttctccagctcgtttgaagaagcaacagcctgaagcgactaaagaactagttcaagttactattcctgaggctcctaaggaagaaaaacgcggcaataatcgtggtcgcaacatgggaaagccaggacgcaagggtaaaaatcaatttggcaatggtcgtagtgaccattcagatcgttcagagagaaagcggcgtaagaataaaaaacgtcaacaagagcaaaagccaaagaaaacacttactaagcgtaaggaacgtccattaccagaaacattagtttacgaagaaggtatgaacgctcaagatattggtaagttaattcaccgtgaaccagctgaaattgttaagaaactcttcatgcttggcgtgatgactaaccaaaaccaatctttggataaagatacaattgaacttttagctgctgaatatggtatcaatgctgagcaaaaagttcatgaagacatctctgatattgataatatctatgacaagagaatggaagagtcaaaggaatctaaaaaccaggttaaacgcccaccagttgttacaatcatgggacacgttgaccatggtaagaccactttacttgatcgtcttcgtcatactcatgtttcagctcatgaagctggtggtattactcaaaagattggtgcttaccaagttagattagatgatcgcttaattacattcttggatacaccaggacacgcagcattttctaacatgcgtgcacgtggtgctgaaattactgatattgttgtactggttgttgctgcagatgatggtgtaatgccacaaactgtagaagcaattgaccatgcaaagagtgctaatgttccaataattgtagcaattaacaagatggataagccaggtgcaaatccacaacacgtaactgaggaattaatgaaatacaatttgattcctgaagattacggtggtgatactatcttcgttaatatttcagctaagacaggtcaaaatgttgatgacttattacaaatgatcttgttgcaatctgatgtgatggaacttaaggctaatccaactgaaatggcaattggtactgtgattgaagctcgtttgtcacgtggtcgtggacctgtagcagacgttttaatccaacaaggtacacttaatgttggtgacccgattgttgttggtaacacttttggtcgtgttcgtactatgactaatgatcgtggacgtcaagttaagaaggctacaccatcagaacctgttgaaattactggtttgaacgatgtgcctgaatctgctgataagttagttgaatttaaggatgaaaagaccgctagaagtgttggtgaagctagagcacaacaagctttacaaaagtctcgtgaaaatgttcaacacgtaactcttgataacctcttcgatactatgaagaaggaaaacatgaaggaagttgacattgtcttgaaggctgatgttcaaggttctgtagaagctttacaacaatcgcttgaaaagattgaagttgaaggcgtacgtgtaaatatcattcactcaggtgtaggtgccattaatgaatcagatgtaactttggctggtgcatcaaatgcatttattattgggttcaacgttcgtccaactgctactgctaagagccaagctgaaaccgatggcgtagatattcgtctttacagcattatttacaaggctattgatgatgttactgctgccatgaagggtatgcttgaaccaacttatgaagaaaaggttatcggtaatcttactgttcgtgaaacttggaaggtttctaaggttggtacaattgctggttccttcgttgataagggcttggttaagaatgattctaagattagagttattcgtgatggtatcgttaagtatgatggtgaaattgcttcacttaagagatttaaagatgatgttaaggaagttaagcaaggtaacgattgtggtttaacgattaaggactacaacgacattaaagttggcgacgaattcgaagtttacgaaatgcaacaagttgagcctaagtaattactattaggaggaaaacatgaagcatagaattggtcgtgttgaaggtgaaattctacgcgaattaaccaagattttacaaaagaatattcgtgatccgcgcttaagtggtgtaactattaccgcagttgaatgtacgaatgatctttcatatgcaactgtttattacagcctgctaactgaagatgagcataaggaagaagaggttcaggcaggttttgaaaaggcaaaaggcatgatgcgtcatttgcttggtcaaacattaactgtttataaggttcctgaattaatttttaaacgtgataattcagttttgtatggtagtaagattgaccgtttgattgcagaagttaagaaacaagatgctaagcgggaaagcaaataaaaaagagggcgccgtgatggtgccctttttttgttgaaaagaatagggaataattatgttaaacggaattttagttattgataaagataaagggatgactagtgcagatgtagtttatcatttgcgccgcgtattacatattagaaaaataggacatgctggtacgcttgatcctgaggtgacaggcgttttaccaattgctattggtcaggctactaaattaattgaaatgatgcatactaggccaaaagaatatattggcacgggactatttggttatagcacagatagttatgatgcaactggaactgttttaaaagaaaaaaagttgattcagcctttttctggtgcagaaattcaagaaaatatgaataaatttgtaggagaaattgttcaagtgcctccaatttattctgctgttaaagtgaatggtaaacatctttatgaatatgcgcgtgaagagattgaagtcgagcgacctcagagaaaggttgaagtcaaacaatatgatctaactaaagaaccagtttttgatataaatactgggcaagaaagctttgattttaagattaaatgcagcaaaggcacttatgttagatcgttagttaatgatctaggtgaaaaattagattgccccgcaacgatgacttatttgagaagaacagctagttctggctttgatattacacaagcagtaaaattaaaggagattgaagagaatccgaaaaaggccactgaacttatacagccgattgatgcattttttaaggaatacactcaggttgatttaactgaagaaaagtggcttaaagttaaaaatggagcgggtatttcgcttgaaactaatgcgaaaaaagttgcactacgatacaataaaaaggtgaaagcaatttatgaaaaaaaaggaaagctttatcgcccaagcttaatgctgttgcaaaatgaataaatgaaatgaaggaattagctgtgaaaatcgttcatttaacatatcctgttaaggaaaatattttatctactagaattgtgcttgcccttggcttttttgatggggttcatttgggacatcagcgcttaattaatcaggctaaagaaattgcattacagaagaaattgtcattagttgtgttgacctttgatcgacatcctaaggaagtttatgagtcgaaacgagattttaaatacttagaaactttggaagaaaaagctaacaaaatggcggaattaggagtagattatttggctgttttaccatttactaaaaatttcagtcaaatttctgcacaagaatttgtcgataatgtaattgtcagattaaatgctgataccgttgttgctggctttgattacacttatggttctaagaatattgcaaatatggctaatttaccccaattttccaaagggcgttttaatattgtagtgatgccaaagcaaacttttaacggtagaaaaattggctcaactgaaattcgtcaagcaattaaggatggtcagatgaaattagccactgaattaatggggcaccattatgtaatgagtggtatcattgggcatggtaaacgaaatggtcataagctaggctatccaacagctaatttgatttgggcagaacataaggtgattcctaaaattggagtttatgctaccaagactaaagtaaatggtaagtggtataactccatgactagcgttggctataatgtaaccattaatcaggacaagaagatatatattgaatctaatatttttgattttaatgaagatgtctatggtaagccaatgaagatcaaatggtataaatataccagaggtgagaaaaaatttgccggattacctgaactgaaagagcaacttgaacgagatgagcaagaaattagggcttattttaagcaaaagggttaagaagctacgtactttgaaaaaagtgcgtattttttgaataaaattagcaatctacttgatttagtgctaatttctggtatcatattaactgttagcacctgagagatgtgagtgctaaaagtgagggcgatataatatgttgaccgagcgtcaagagcttattttaaaaacaataattacagactttacacaaagtcatgagccagtaggctcaaagaccgtaatgaagcagttgccaattaaagtttcaagtgcaacgattagaaatgaaatggccgtgttggaagagcaggggttaattgaaaaaactcactcttcaagtggtcgaattccttcaagcgagggctatcgttattatcttgataatttagttgagccgttgcaattaccagagtctgtttataatacaataggaagccaattagatcgaccttttcatcaagtaaatgaaattgtacaagaagctgcacgaattctgtcagatttaactaactataccgcatttgcggaaggacctgagagtcatgatgttagagtcacaggatttagaattgtaccgctgtctcaacgacagattatggcaattttggttacaagtgatggtaacattcaaaatcaggtatatgctttgccacataatattcacggcgaagaaattgaaaaggctgtccgcatgattaatgatcagttagtcggaaagagcctaaatgaaatcaacgtttcgttgctaagtgaattagctaaaaacgaattaggcggcgaacatgtgactgaattgcttagtttagttgaagatgtcgtaaaagatgcagctagtgagcagatgtatgtggatggacagattaatttgctcaataatacttctgaacatgatgtaaatgacattcgttctttgtacgagttgattgatcataataatctgttcactaatttaatggatgcaaaggtggatccaaagtctggaaattattcagtaaaggttaagttgggatctgaattacccaatgatttattaaaaaattatagtttgctgacagctgagtacagcgttggctcccatggtaaaggaactattgctttacttgggccaacgaatatgccatattcacaaatgattgggttgcttgaatattttagaaatgaactagctaaaaagttgcttgattattatggcaagtttcaataaaggaggttagccgtgagtaaagaagaatttccaagtgaaaaaaatctagagcaaaaagaaaagacttctgagcctaaggctaaaaaagaagccgataaaggtgaagaaaagaagcaagaaaaaaataaacaagatcaaaaattagctaaagaattagctgatttaaaagataagaacaaggatcttgaagataagtatttgcgtagtgaagcagaaattcaaaatatgcaaaatcgctacactaaagaacgtgctcaattaattaagtacgaatctcaaagcttagcgaaggacattttgccagcaatggacaatttggaaagagccctaagcgttgaggccgatgatgatgtgtctaagcagttaaagaagggcgtgcaaatgaccttggatgcacttgtgaaggcaatgaaagatcacggtgtagttgagattgaggctgatggcgttaaatttgatccgacattacatcaagctgttcaaacagtagcagctgagaatgatgatcaaaaagatcacgttgttcaggttttacaaaaaggatatcaatataaggatagaacactaagaccagcaatggttgtagttgctcaataagagaggaagctaatatatgtcaaaagttattgggattgatcttgggactactaactcagcagttgcagttcttgaaggtaaagaaccaaagattatcactaatccagaaggtaaccggactactccttcagtagttgcatttaaagatggtgaagttcaagtcggtgaggtagcaaagcgtcaagctattaccaaccctaataccattgtttcaattaagcgtcacatgggtgaagctgattataaggttaaagttggtgataaggaatatacaccacaagaaatttcagcatttattttacaatatattaagaaattctcagaagattacttgggtgaagaagttaaggatgctgttattactgttcctgcttacttcaatgatgctcaacgccaagctactaaggacgctggtaagattgctggtttgaatgtgcaaagaattattaacgaaccaactgcttcagcattagccttcggtttaaataaagaccaagatgaaaaagtcttagtatacgaccttggtggtggtacttttgatgtttctgtattgcaattaggtgatggtgtcttccaagtattgtcaactaatggtgatactcatcttggtggtgatgactttgatcaccgtatcatggattggttaattaagaactttaaggatgaaaatggtgttgatttgtcgaaggacaagatggcaatgcaacgcttaaaggatgctgcagaaaaagcaaagaaggacttgtcaggtgtatcaagtactcacatctcacttccattcatttctgctagcgaagctggtccattacaccttgaagcagatttaactcgtgctaagtttgatgaattaactgctgacttggtagaaaagactaaggtaccatttgacaatgcattgaaggatgcaggtcttactgttaatgacattgacaaggttattttaaatggtggttctactcgtattccagctgttcaaaaggcagttaaggaatgggctggtaaggaacctgaccattcaattaaccctgatgaagctgtagctatgggtgcagcaattcaaggtggtgttatctcaggtgatgttaaggatattgttttacttgatgttaccccattgtcacttggtattgagaccatgggtggtgtcttcactaagttaatcgacagaaacactactattccaacttcaaagagtcaaatcttctcaactgcagcagataatcaaccagctgtagatgttcacgtattgcaaggtgaacgtccaatggctgcagacgacaagactcttggccgctttgagttaactgatattccaccagcaccacgtggtgttcctcaaattcaagttaccttcgatatcgataagaacggtattgtaaatgtatctgctaaggatatgggtactggcaaggaacaaaagattactattaagagttcatccggtttatcagatgaagaaattaaacgtatgcaaaaggatgctgaagaacacgctgatgaagataagaagcgtaaggaagaagcagaccttagaaacgaagtagatcaattaatctttactacagataagactttgaaagatactaaggataagctctctgatagcgatcgtaagccagttgaagatgctcttgaagctttgaagaaagcccaaaaggacaacaacttggatgaaatgaaagaaaagaaagatgctttatccaaggctgctcaagacttagctgttaagttgtatcaacaaaatggtggtgctgctggtcaagctggtccacaagcaggtcctcaaggcccacaaggtggtaattcaaataatggcaacaacggtaatgcccaagatggtgaattccacaaagtagatccaaataagtaatgggtttataattaaacaaaaggagaaaagaactacccattgagtagttcttttcttttgagaatacaaggagttcaaatagatggcacaagaagattactataaagtacttggcgtagatcgtgacgccagtgatcaggaaataagtagggcatatcgtaaattagccaaaaaatatcacccagatttaaaccatgaacctggagctgaagaaaagtataagcaggttaacgaagcctatgaggttttgcatgataagcaaaaacgtgcgcaatatgatcaatttggttctgctggtgtaaatggtcaaggtggctttggtggtggagctggtcaaggctttggcggtgccggatttgatacttctggctttggtgattttggcgatatctttggcgatatttttggtcaaggccgtcaacagagggttgatccaactgcaccacaacgtggccaagatttggattatcaattgacaattgattttatggatgccattaagggcaaaaagacccaggtcagctatactcgaagcgaaacttgtgaaacttgtggcggtaatggttgtgaaaaaggtacacatccaattacctgtgataaatgtcatggaactggttatatgacaattactcaacaatcaatgttgggcatgatccgtcgtcaaaccacttgtgacaaatgtcatggtcgtggtgtgattattgagtatccatgtaaaacctgtggcggtaaaggaacagttgaccgtaagaatactattgaagtggatattccagcgggaatcgacaatggtcaacaacttagatatcaaggccaaggcgaagcaggtataaatggcggaccatatggtgatttatatattaactatcgaattaaaccatctaaagattttgagcgtcgtggccagactatttatacagaagtaccaatctcatttgctcaggctactttaggagatgaaattaacgttaagactgtgcatggtgatgtaaagctaactattccagctggtacgcaacctaataagaagtttactttgcgtggacagggtgtgccatatcttcgtggtaatggcaatggtgatcaaattactacagttaatattgttattccaaagcacattaatgataagcaaaagaaagatttgaccaactttgttcatgatggtggtggcaatattacaccacaagaaaaaggattttttgaacgcttaaaagataagtttaatatgtaaatgctaaaaaggtttctgctacttgcaacagaaaccttttttaagatcaattaattttttggtgatttttagagtttttcttggaaaatattcaatgctgaattttcaattattattctaaaaactctgcattttattgaaaatttactatgctacaatttcatcatttattctagctttgctataattaatacatagtaaagggtgaacgattttatggatttaaaaaaattaaaagactatcaaaaacacattcgaaattttgctattgtggcgcatattgaccatggtaaatcgactattgctgacagaatcttagaattaactgatacagttagtcaacgtcagcttaaaaatcagatgttagatgatatgccacttgaacgtcaacgtggtattaccattaaaatgaactcagttgaagtgaaatatcatgctgaagacggtgaagactacattttccacttaatcgatacaccaggacacgttgacttttcatatgaggtatcacgttctctagctgcctgtgaaggtgctttaatggtggttgatgcttctcaaggtgtacaggctcaaactttggctaatacttatttggcaattgatgacgatttggcaatcttgccagtaattaacaagattgacttaccatctgccgatgttcctaagactaaggaagaaattgaagaaatgttaggtttggatgcttcagaagctgccgaagtttcaggtaaaaccggtcaaggtattaaggacatgctggaaaaggtagttaaagatattccagctccgtctggtgatattactgctccattaaaagcattgattttcgactctaaatatgatgattatcgcggagtggtaatgtctgtcaaaattgaagatggatctattaaaccaggcgatcgaattcaaattatgaatactggcaaggaatatgaagtcacagaggttggtgtttctagtcctcatccaattaagaaggatattttaatcgcaggggatgtaggatatattactgctaacattaagtccgttcgagaaacacgtgttggtgacacaattactcaagctgataacccaacggctgaaccacttccaggctatcgtcaaattccaccgatggtttattctgggatgtacccagttgacaaccgtgattatgaagatttgaaggaagctttacaaaaactacagctgaatgatgcagctttagaatttgagcctgaaacttcaacagctttaggctttgggtttcgttgtggcttcttaggcttacttcatatggatgttgtacaggaaagattagagcaagaatttgaccttgatctaatcatgacagcaccatctgttgattatcatgcaattatgaatgatggaacaaccaaggtgattgataatccatctgatttgccagatgctggtgaatataaggaagttcaagaaccttatgtaaaagcggaaattatggtgccaaatgattttgttggtccagtaatggagctttgtcaacgtaagcgtggtgaattcgttaccatggattacttggataagtaccgagttaatgtaatttacaacatgccattagctgaaattatttttgatttctttgatgatttgaaatcttcgactaaaggttatgcttcacttgattatgaaattacgggttatcgtgctactgatttggttaagatcgacattttgcttaacaaggagccaattgatgcattgagttttattgctcacagatcagaagctcaagatcgtgcccgtcaaatgacttcaatgctaaaaaaactaattccacggcaaaactttgaagttgatattcagggcgcaattggagctaaaattatttctcgagctacaattaagccataccgaaaagatgttacctggaaaatccatactggtgatccagatcgtcgggctaagctgcttgaaaaacagaaacgtggtaagaagcgaatgaaagcagttggtagagttgaagtacctcaagatgctttcatggcagtcttgaagatgaacgatgatgacatcaacggtaaataaaaatggctaaaaataaaaaaaatagtgtaagtacaattttacttagagttgctgctatcatattattgcttgttggtattgctttgatatttaacaaacagatcagtgatcaattaattcatcataatcaacaatctactttaagtggaataaatagaaagacaattgaagaaaacaaaaagaaaaaaggaatgtatgattttagtaaagttaagtctttaggcattgcacaagcagcaagatcacaagtgaaaaagacttctggtgcgattggtgcgttagctattcccgatgttaatatgtatttaccgattatgttggggatgagtgatgatgcaatgtcgactggtggcggcacgatgcgagccgaccaagtaatgggtaagggaaattatcctcttgcaggtcactacatgacagcaaaaggtattcttttctcaccacttgaagatgttaaaaaaggtgagttagtttatttaactaatcttaacaaagtatatgtctatcgaatttatatgaaaaagattgttgatccaactgcggtttggctagtcgataatactaagaagaatattgtaactttgattacttgtgctgatggcggtaagaatcgttgggcaattcggggtaatctgattaaaactgaaaaggctaacaacaataatcttaaggtttttaaattaaaataaaaatttacaatctttaatcagatttagatttgcgataaaattataaatagattttgtaataaagacactcaacaatgagtgccttttcgttttgatgagagaacataaggtgtttgataattaatgaaatggcaagaaagaacagctgatgaattagcaccagacttgattgagaaatatcaactaggtcccattgcagccaaactttttgcattgcggggtattaatacagacgaaaaacttgatttttggtttaatgcaacagaagaaaatctggctgatccagcgttaatgcatgacatggataaggcaattaaccgaattaatcaagcaattgatagcggcgaaaagattacaatttatggcgattatgatgctgatggaattactgcaacgactattatgactgaaaccctaagcattttgggcgctgatgttcattattttattcctaatcgcttcaatgatgggtatggtcctaatatggaccgctatcaagatattgtagctgatggaaccagattgattatcactgttgataatggtgttactggggtcgaggaagtcaaatatgctcaagaacataatgttgatgtaatcattacagatcatcatacttttcaagaaaagaaaccggcagcttatgctactgttcattgtaattatcctggccaaaaatatccttttgatgattattgtggtgccggagtagcttacacgatttgtcgtggtctaatgcaggatactatgcctgagctgctagatttggctatgatcggaactattggcgatatggttaaggtgaccggagaggggcatattatcgttaagcgtggtttagaaatgcttaatcagacagatcgtcctggcttgcgcgctctaatcaaaaatgctggtttgactttaggcagtattaatgaaactgatgtcggctttaatattgctcctcgattaaatgctgtaggtcgattagataatgccaacttggcagttgagcttttgctaagtgatgatgaccttgaggcccaaaaaattgcagataagatcgaagaattaaacaataaacggaaagaattaaccaccgaagtctatgacaaatgtatgacgttaattcataaaaatagctggcaaaaacaaaatactttggttttatatgaccctgaatttcacgaaggtgtgttaggtttagtagctaataagatcgttgaaaagacacataaacccacgattgttttgactaaaaatgatgcaggtgaggttaaaggctcaggtaggtcctttgctggtttcaacttgtttgatgctttaaatccgatcaaggatcaatatttaaccaaatttggtggccatgattttgcctgtggtttatcattagaagaaaatcagattgcgccattacgggaaaaatttgaagatgactttcatgttgaaggtggtcttgagactaaaaaatatgacatggaattgcctatgcagggcttaactccgcagacactagcacaaatcaatcaagtaggtccatttgggacaggtgacacgcagccaatctttagtatctctaatccaacaatcactcatttctttaaaatgggtaaagataagaatcatgtcaaatttacggttgctaaaaaaggcggtaacttatcagttattggatttaataaaggctttttgaataataatcttttgccgtttatttctcaaatttttgttcaattatcattaaatacttatcgaaatcaagtttctttacaaggaatcatgaccggactagcttttgcttcaccaaaattggcagtgccaacgccagttgttgacttacgccaagagaaatatgttatgggtttcgcggaccgctacctgttatttgatcaaaaaaatattccgattgttcgcaaccgactacagatcgatgaagacaagatctctttagttaaagattatgatcaaactggtgaaacagttgcattattagatgtgccacgcaatcagattgaattaaatgctgcattggagaaagattatcaacaaatctatttacgctttttgcttgatcaattgcctgttgaacaaattcccgctaaaaattattttggtgctgttttaaaatatatttatagtcaccctacgttaaagccagcagattaccgtacagttgcaccttatttgggactagattatgatagtgtgcttttcattttacgagttttctttgaattaggctttgtaaaattggatgaaggtaaattggtaggagagccttctcctaaaaaacagccgctgacagcttctaaatatttaatgggaacttcttctcagattaaatttgttaatcaactaagaactatgcctagtcaacgtttgattacatatgttaataatttgacaaataaatagataactattctgttttcagtgcttttatcgttaaaatttgttaaaatatactggtcaaaagcgtttgaacacaaacacagagcattttggaggttatgcttcttatggcagttgattttagtaaatatattgcaagtgttaaggattttcctaacaaaggcattgtttttcgcgatattacaccaattttgcaagatggtgaattgtatcgtgccgctactcatgaattagcggaatatgcaaagagtaaaaaagcagatgtaattgttgggcctgaagcacgtggttttattgtaggttgtccagtagctactgagttaggtttaggttttgtacctgcaagaaagccacataagttaccaagagaagttgaacgtgcttcctatgatttggaatatggttcaaacagtttggaaatgcacaaggatgcgattaaacctggacaaagagtggttgtctgtgatgacttgatggctaccgcaggtactttaagagcttctaaagagctaattgaaaaccttggtggtaagttagttggtgccgcattctacatcgaattgccagatttacacggtagagataaattacctgatgttgatatttattcacttgttcaatatcatggtgcttaaaatagaataaataaaaagagggaattaaatcaatttgaactgagacctaaaagttagacacttttaggtctttttctacgtaaagtcaagcataataagaagtttggcttcattttttgtttaaatttcaacttaaacatcttttagtgtcgatttatttttttagttagacacgacaaataagcccagatccatatctgatttttgggcttagcgttataatgtacttgatcaattaattacgactaaagtctttttgattatgtgtggctacgttgtaatcatatggttgatcattgataatcagggcataaatggttctgattagtttatgaattgaagcaatagctatctttttgaaccctttggtttgagaggatagctttttgctttcataataatctgctatatgacacggatttgtcttagctgcattatcaatttgtccaatagctcgataaagcaacttacgtgcgactgcattgccatgtttagtaatacttaaattagagtccatttctcctgactgatatctgcctggatcaattccgataaaagcattgattttattaggattactaaatctgcgtaaatctcctaactctgctaaaactctgacagcagtggtctgtgcaaagcctggaatgctttctaggttttctaaatcatgattaggcaaagacttcgctaacttaaccattcttgcgattaaattttctctttgatcacttaaattaagcaatctgtgtgcataatactgcacttgctcgacttctatgctagagcaagatacaactggataagcttgataagctaattcaattaatttatctgcagtccttagagcgtgtttaaaagcaatcccctttaagctcattaaccagttaataagctgttttttatcttctcttcttactaagtcacaatgaggatatcgcacaactatttgccagtaatttttacctttagcagaagaaaataaattttcaatttcaggaaaagtcgattgtagagcttggtgaagtcgatttttagctattaccaagtcacttgtcagctggtcatagaagcggctcaaagcattaagctgcttataagtttgggattcgctttgattaaccggatggcgataaagtctttgaattaaagctaaatgataagcatcagttttatcggtcttgttgtagcgtagccccatattcatctcttttttggctttaagcggattaataacaacatattcatagccgtagtcttcaagaaaagcctgcagtctgcgtgaataaacaccggtagcttcaaaaataatttgcggatgtttagaaaaagcggttaattcatgaagcaattgaataaaaccaggacgattattagtaatggttagttcatttttgctttcaccaattagttcacaaacagtagaagtagacttgcttacatcaattccaaaagtaacttgcataataaaaacctccaaaacttagtagtaaaacgtatttacttaagaaatcagatctaattttctaaactcgacatctagtgtccacattcttcgaagagactattgaaaacttaagtaaaactgccagtttattatgcgacatcaagtgtctaaagacctcagggcatatcgttttaccactactttaattctacaaaagaataaaaatagtgaatcaattatcccgtcggataactaattcactatttagcttagaatgtttattatttgttaccgattaatttaaattttgaccatggtttaataaagtcgagcaggaataattcgtctgatctaatagaaccgactttgttcatccttgactccttatgaggttcaaggacaatttgtagttcatttttgtaatgaccaaagttgtcgttaccaatgataatatctccgcgttggaattctacattgttgtcgtgtactggattaggaatatctgcataagttacacggggcatggttgaacgaattacatccttagtgatatcaccacgacggaaatgttgaggcgcttctacgatagttttctcaatcttattaacatcagtaacgtagtttacgtgcaacatcaattgatagcgattaactttagataaggcttttaactcggcttcactggcataagcattaccgatgattacatcatcaatcaacccagaagcccagagatgcattgcttgcacatcaattggtaaattacggtcttgctcaagcgttggtaaaccatcttccacgttccaaggtcccatttgacctacttgacttgagacaaaagcggctgaatgaatgccaaactttttgaagcgttcagaacaagcgataaagaagtcgtaaggtaagccagtaccgcgttgaggataaaaattgtgacagccataaataaacggtgtattagcttggtaagaaataatattgttaagatagtcaacattattactcatgttgagttcaatgattagaccatatgggttgtaagaaagcattgcttcaattgcaccatcaaatgttgtgtcaagacggatgcctgctgcaccaatatcagcaaaaaatttcaggtcatcatagctgacacctagttgtttgaagattgcaggattaacatctaaaaaagtttgaaatcccaatttattgccatattcaatgatttttttatacttagctttggtttcttcagggctgccttgtacttcaagcatactcatgaagatacgagaaaagccatatttgtgagctaagtccagatagtgagcgttgccttcaaatttgctgtggcctggataaattgacagacctaaagatctcattgtcataatagtacctcatttttgataattgtctataccaattatatgatattttttattgtaggtctagtccaaagtgaccgagatagtttatattttggtagggtgtctcgctacgtttttaattaaacaggtgttatatttaaagtacagggtatgtgttaagaaggagaaattaagatggataattttgatcaagaatctggtcaacagcaatatgctaatgattcaggattaaatgttttttagcaaaatatatggttatatggccttagcggttttcgtttcagcaattagtgcttatttgacaatgacggtttttgcgggacctatctctgcctttattgcacaacaccaattgtttacggcgttacctttgcttttattgcaggtgcatatagtggacaaaatattgcttcagcatttgtagcttcggcaaccgtctttgtaacaatggcgattttaggaacaattaccaaaaaagatttgagtcgaatagggtcttatgcttctgctgcgttaattgggttgattgtagccatgttagctaatttgtttttacataatccaatcattgactacgttttttcgattattgctgtgattatatttactattttaactgcgtgggatgcacaaagaatgaaagatatttatttacaatatggtgatgatctttcaactaatgggcttgcagttttaggtgctttgcaattatatcttgattttgttaacttgtttttacaatttttggatatttttggtgcaaatgaagataagtaattaaactagtgagactgtaaaatagtttgtgtaaggatgaatgattccttaaatttatttctttaaacattagaaaaaggagttcctttctcgtatgattggtttgaacaaaaaaacacatacagaaagaagaactccttcatgaatgattttaccaaaaatatagcacaagctctattcaatcaagacaaaataaatgatttattgcgcaaagagctacaacaggctgttaataacttgttagaagctgaattgactgcctttctgggctatgatccctatgccagaaatggctggaatactggcaactctagaaatggtgcttatttccgcaaagttgatacgcaatttggcccaattgaagtgcaagtgccccgggatcgcaacggtcaatttcatcagcacacgctgcctggctacaagcagcactcggatatcttggaaagcatgattatcaagctttactccaagggcgtgaccaccagggaaatagccgatctaattgaaaagatgtatggcagccattacagtccagctcaggtatcaaatatttccaagcagatgattccaaaggttgaggcttaccacaaacgcaagctaagcgacaagtttttctgcgtctatttggatgcgacataccttcctttgcgccgagaaacatttgagcgtgaagcagtctatattgccattggcatcaagcctaatgggcacaaggaggtcattgactactgcattgcgcctagcgagaacattgaagtctggacagatatgcttcaaaacatgaaatcccgaggcttaaagcaagttgagctttttctttctgatggtgttgttggcatgaaaacagccttggccaggacttatcctaaagctcattttcaacgctgtttggttcatgtcatgcgcaatatctgcgctaaagtacgcgtcgacgatcgtgaaaagatcatgaacgaattcaaacaggtgcatcaacagacaaacaaagaagaagccacagctgtcctgcatgacttctataccaaatggggcaaggtttacagccatgttatcagaagcttgaaagacatagaaccagatctgctggtcttttataactatcccaagcagatcagagcttcaatttattcgactaacatgattgaatcatttaacaatgtgatcaagcgcaaagctaagcctaaggcagagtttccaactgaacagtcgcttgatgcttttattggcattcaggcaatgagctacaatgaccgttatttcaatcgaattcataaaggctttggtcaggttcaggacaccttagaatcctactttgattaaataaataattaaaaaatcaatttacgagaaagaactatttacacaaaagatttgacagtttcaaactagtttctaataaacgtaggaacacttcatatataaacgtatactatataaatatagtgacatattaagggagtgtttttatgaaaagatgcaagaattgggttgtgactattgttgcatttctgatgttagtgggagaaatcagtgttctgcctgcaaatttgcaggggtcgacatcagttgttaatgcagctattcatcacagaaggagaaagcatcaatatcgtgataaaactaagatttataccagtaattacagaattgttgataataaacgatcaaaaatctttcacgtaatgcgcggtcataattatcgaatgaatcgtgaaaatgcagttttcttcaagagtaaagcagcagcacgtgcagcaggatatcgtgaatcaaaaagataaattaaaagacttctaagagttcaaagttcctagaagtcttttaatttataaaatttatggtaataatctacctgtttttcatcacaggttggtaaattaagtcgattattatggcagcaataatcgctacaattacagtaattgctaagttttgaatggaaatctggaccattgcccaaccacaaagagctaagataaaggtcaatagaacatctgcaatttgaacactaccaaccaacttggatgggtaatcttgccaaaagtacttacgagttctagtaatcaaaacaatcaacattgcgctaagaactaggtatacgtaaaccatagtagaaacagcaccgtgactccaaccgtgtgtgtttaagaaccaaacaaacccaataccaattaaagtccaaccagcagctagtgaaaaggcgatcttagcaagcttagccatattccagttttctggcttataagtaatgtgagtcctgtcagttccaatcatcatcgtaaccatattgttcataatggtatagataaccattgcattcaaggccattgggatgtagtcaaagaaaagatagccaaaagttaacagcatcgttaattcagcagttctagcaagcttggttagtgaccaagtagtcattctttggtatacgcgatgtccagcgtctaaaattttaacaattgagcctagaccatcgtctagtaataccattttacccgaacgcttagctacgtcagcagcatttgaaactgcgattcctacttcagcttgttttaatgcaggcgcgtcgttaactccgtcacctgtcatccctacgatatagcctttttcttggaaaagctttaccatcttgagtttatcttctggtaaaacatcagcaataccggccaaatcattaatatcagtattttcattgaaatcgtgaatcgaaattactttaccagttaaatcaacttgttctgccactgcagcagcggtcttttgattgtcaccagttaacataattgggcgaacgccacgtttcttgagttcagccaaagctgctttagagtctgttctaactttatcttgtaagatgaagacaccagctaacttatcgtcaatcaagactgccactgagcgtcctgccttgaaattaattccagaaatttcttcatcggcatgtttatcgatcaaagataattgcttaaatgaaccaagctttacattatgtccagcaacatcagccatagaataaccagtgtcagaagtaaatggagtaaagttttcagcattcatgactggaatgttattttctactaagtattcatcgattgctgtatcgataataccagcattacgtttatcagttgcggctccagctaaagcaagcacgtctttgtcaggcaagtcacttagatcagtccaagcggctacggcagttttgttttccgtaattgttccagtcttatcaagtaaaagcaagttcaagttagctgcgtcctgaattccagttaggtcagaagtcaggactccttctttacttaagcgggttgcttcaaatgagttggataaagcaaaagttgatggcattgctacaggaattgaagcaataaacatcattgccaggaatggcaacatattaataaaggtattgaaattaccgcctttgaagaaggaggcgataataataactaaggttaaaacaccatctagtaagcaaaggtagtagataatcttagtcaaaagttgttgtaagtgaccaggagcagcggaattgttgatcaaattaatcgtcttaccgcttctagaatctttacctgtagcagtaacaacagctaggccatcaccttcaacaactgtagtaccggcaaaggcggtgtcatcaattgctttcttaactggtttagattcacctgtaattgagctttcatcacaagctaagttaccgtcaacaattttaacatctgctgcgagtacgtccccgcgtttaagtgagattaaatcgcctttaactagttgtttagaatcaagtttgatccacttgccatcgcgttcaactgatacagtaggagtcaacttgtgtgaaatattatttaaaactcgtcttgattgctttttcttagatgcaccgttaaatgcagcaaataaaagcatcaacaacacgaataatgattggacccatttgcccaagatacattctagaattaaagcagcttctagaatccaagcggataggttccataacttagacaagaactctttaaagaaattgtattcaggctctggtacttcatttaagctatcttcttttaagcgcttgtctgcttcggcttgagttaagccgtgaaatttatcagacattattttccctccaaatctaccttaataaggtagcacagatattgctatgaataaaatactaaaatacaatataagatattaaatattttaatatcactatcaattgaaataaaaaaaggataaataatatgaatctaaaacagttacgttattttctagttgtagcagaagaaaagcagattacagcagctgctaagcgcttgtatattgcacagccaccattaagctatcaattaaaacaattagagaaagagttgggcgcgcaattatttaaaagaacggcacatggtattgagctaactgatgtgggacaaatttttcaaagctatgccaatgaaattatttctctagctcaaaatgctgaaaaccaagtacataagactatttccggtgaattgggaacgattgcaattggaatggcatcttcctcaacgggcttgataccaatgaattcttttaatgaattacgaaaatattatccggaaatttcttttgatatttatgaagataatacttatggcatcctggataaattagaaaaaaagacaatcgatctaggcattgtacgaacgccttacaaccagacaggtttaaatactaagactttaacaactgaaaaaatgatggctattagtgtagacccagattttcagcaaaaaaaagaattacgcattaaagatctagcagatcagccattgattatttatcgtcgctttgaggatatttttaatcaaacttttgcacatcatgggcttaaaccattttatgcggttaagtgtgatgattcacggacagcaattacttgggccaagagaaaaatgggagtagcgctagtaccagaatcaattgcgacaacttatgcccaagaaaatatgatcgcaattaaacatgctaattggataacacatttgcagctggtttggcgtaaagatcatcaagttacacctttaatgaaaaaaatcattgctgcaatatgataatactgtaacttttacctaattgatccataataaatgtaaacgggtacaataattaatagaaggtggttgaatgtcgagtccgattcatgtttattcagaaattggtaagttaaaaacggtgatgttacatcgaccgggaaaagaactagaaaatctagccccagatattttgcatcgaatgttgattgacgatattccttatctgaagattgcccaagaagaacatgatgcttttgcgcatgtattgaggcagcaggggatcaaagtattatatcttgaggatttattagcagaatctttaacagatgagaaagttcgtcgggcattcttagatcagttactggatgaatcaagtattaaaaaacaggatcctttgcatcaattattgctgaactatctccaagaattgctaactaaggaaatggtaaaaacggtgattgctggaattagaaaaagtgcgattcataattctaccccatctttagcagatttggctgaggacccagattaccctttttatcttgatccaatgccaaatgtatattttactcgagatcaacaggctgcaattggttcagggatgaccattaaccggatgactttcagagctagacgacgtgaatcattatttatggaaacaattttgaaaaatcatcctgatttcaagaacgcaactattccagtttggcgtgaccgttatcatcatggtcgccttgagggcggggatgaactagttctaaataaccatgtgttagctgtaggtatttcacaacgcacttctgcaactgcaattactgacttagctcataatttatttgatcattcaagttatgatacgattttagcgattaagattccgcacaatcatgctatgatgcaccttgatatagtttttacaatgattaattataatcaatttacggttcatccctttattttagataaagccggcaaaattgatatttatgttctacagcccgatgatcacaacggtgtaaaaatcacagaaaagaatgatttggtgcaggttttgaaagaaaacttacatttaagcgaattggatttaattccaactggtggtggtgatccaattgccgcaccacgtgaacaatggaatgacggctcaaataccttggcaattgcaccaggtgaagtcgttacttatgatcgtaattatgtatccaatgatttgctaagaaaacatggcatcatcgttcatgagattcggtctagtgaactctcacgtggtcgtggcggtcctagatgtatgtcgtgtccgttgattcgtgaagatttataagaggcaaaaaatgaaatatttacaaaatgtttttcaaggtagaagttttctcgattgtaaagactatactccagctgaaatttcatatttaattgattttgcattacatttaaaagaacttaaaaaagagcatatcccacatgaatatctgaaaggtaaaaatattgcactactttttgaaaaagcctcaactaggacgcgatctgcttttgtagtagcttgtaatgatttaggtgctcatccagaatatctaggcgcaagcgagatccacttaggtaaaaaagaaagcgtcaaggatacggctaaagtcctaggctcaatgtatgatggaattgaatatcgcggttttgctcaagaagatgtagaagagctggctaaatattctggcgttcctgtttggaagtgggtgatggccgcgataatgttgccgacagtcttttagtttgtggctcaatgttaggtgttaatgtacatattgttacacccaagcctttgtttacacatcctgatgtacaaaaaattgctcaaaattttgcccaagattcaggttcaaaaaatttgatcacagatgatattgctcaaggcgttaaaggagccaatgttgtttataccgatgttggggtttcgatgggtgaaaatgattggtctgaacgaattaaattattaaagccatatacggtcacaatgaaaatgatgcaaatgactggtacaccagatgaccaattgatctttatgcattgtttgacagcttttcatgatcgaacaactcaggtgggagaagaaatctatgaaaaatatggcttaaatgagatggaagtaactgatgaggtctttaattcaaagtatgcttggcaatttacagaagctgaaaatcgattgcattcaattaaagcagtgatggcggctactttaggaaatttatttattccgattgcctgtggcggtggtggcatccttgttattgtgaaagatgggcatctcagaggtgttgccggcgtaattcataaagatttttccgctgctaaaatggcagaagatatcaacgctgatgaattagtaattctaacaacggtggatcatgcatttttgaattatggcaaagaaaatcaacaagcaattggtaaaataaaagttgaacagctcaaacaatatctagcagcaggttatttcgcagctgggagtatgaagcctaagatagaagctgcaattgaatttgtagaaaaaacaggtaatttagcaattatcacctctttgagcaatgccaacaaactagcagacggagtcggcacaatcatttataattaactgggtgataaaaatgaatatttttaatgaaggaaaaaagcaggatattgcccaagttttagcagctaaagataggcgagtagctgtacaacataagatttttaataagtatcctaatcaaactctagtcgacattaatatgaatatcccaggaccaatcaagaataatcgctatttaactaaaatgtttatgttgggtatcaatgagctggaaaatgcttggactaacctaggttatcattttaaattggtgacacagcttaatgatgatagtggctgtgaaaacttttatgtattatctttgtcaattgaaaaagtaaagcgctcaacaattgattttgagaatcagatatcattgggacgtctctttgatgcagacgtgttggtaaaaaataaacaagctgcaatttcacgcagagatttgggcaggcagccacgtaagtgctttttatgtgatcgccctgctaaagaatgtgctcgtagccggagacattcagtggaacagatgcaggcatttatctctcagctttatcaagaatacgttgcgtaaaataaaccgggattttatgattccggtttatttttatgaaaaatctagttaaaaatttaaaaaatgaactaaaatagtaatgaataaatttatagatgtacgtataggaataagcatggaattaaagaaaaataagaataatttaaagcaaattacggcattaattcaatatgcatttttgaaaaataatgatttgactaaagacgaaaattttatgagtcgttatgatcatagtacaggttatggctattttgataaggaaaaattagctagctatattatggttaatcgatttaaaagtgatgtttttgggcatcatttaccgatggctggaataggttatgtagcttcatatcctgagtatcgtggccaaggtcatatttcccaattaatgaaagaaattttgcatgacttacataggcaagatattccgtttgctaacctggcaccattttcggagagcttttatcgccagtacgggtttagcaatagtatttatcaaaaagaatatcgctttgatggaagcgcattgcgtagttttaaattaccacgttctggtcatatagtgcgtggcaagtgggacaatttagctgttcaaaatggtgtgattcaactttatgaacgtcaactgcatactgatgatgaacgtaacacggttgtacgtgaggcatggtggtggaatagacttgattcttattatcatcaccgcaatgtagccgtttattttgacgcggatgagcggccaattagttacttgatttatcgcattagagacaatacttttttagctgatgaaatgtacgcaattacgccgcagggattactgagtatgtttggttttatgggttcgcacgcgggcagtgttaagcaatttaaaatgagcgtaccagagaaatcgttacgagctgaactttttcctgaacaaaacgaactccaagttgatttgcgtccttatatgatgagtcgaattattgattttgaaaaagttttggcttgtatgcggccaatgcaagaaggtgattttaatctggaagtcaatagcgatgaacagtgtccttggaatattggagtttggcaattaagtaatcatggacgtaaggtagcggtagaacgtaaggaagatgcattggttgatttttcgggatcaattaccgcgtggacccaggtgctattaggtagactaaccatgaatgctgctgttaaactaggattaattacagattaccgcatcaaaaaattagatttcgttaaaggcgatgtatcattttatgattatttttagttgtgaggttaaaaaatgagtaaagaaaagaaactcaatttaataaaattatttggcattgtagttagtggtttgaatttgatcttttttgccttgatggcacttaataagcatgaagatactaaggataaaagaagagtagcagaagaaggacacgcaccgctggatgaaaaataaaatgacggaattaaagattgcatattttgaccaattaggtcgtaaggaattagatcaggcagtgcagcattttgtgttaaaacatcctaatgtagatgtaaaactacttgcgactagtcatgatggtgcttttgcaaaactgaatgaagatgaagcagacatagcaatcaatgatttgcgtgacgagaatcttaactttgatgaaacagaattgactcaagctggtgtaatggcaattttgcccaagggaatgtatcctaatggcattcaaatgattgaaaaagacgagctcaatgatatgacttgttttattgtggctaaacctgaagaagaggttagtgagctacatttatttaaagatttgtatcaaattggcagtcaattcatcgcttctaactcggtcgaagaagcagcactgttggtcgcctctaggtctggctattttattttaaatgagaatacggctaggttaattaatactacagatttgcagccacttttcttgcttgatcatggtcagttaataaagcaaaagataatggctttttataagtcaaattcagcgttaagtagtgagtttataaagctattgcagcaagaatattaatctgtaaagttaaaaatatcttgtctaagtactataagatactgtaaaatatattatgaaagcggactcatatattttacattctggagatgatttttatgctaaaaagaactttgttacctttaacatcaatggtacttgttttaggattaactggtttggctagtcaagttgagactgttgatgcttcaacttatggtaatggtgtacaggttactattccaaaaaagatgcagggtacttggtactcttatgatcgtaatgcacataatggcacaaagatcacctttactgaacatactgttaatggcaaaccaatatttacccaggaggcttcgacaattagtgattacttcaatggtagaattgctaaccagaagaactttgataaggtaacgcaaaactggatgtctggtaaaactaccaaaatgaagaatgatacattctatgagattgatccgtggattacttttgaaaattggagtctttatcgagtggtaccacaaaccattaatggtaaaaagcataacgtgctggtttattctagtagatatgatggtggtaactacttcagaagcaagaaattagctaaaaaaatgaaggactacaagtttaagaaagttaattacacgttatagttttgtgacatcccttaactaagggatgttttttactaatagacgcgataaaatttagtataataatgacaaaattaattcttggaggagaagttatgaaattaaaacaaacaccaattttgcgtttatataaactagaaactaataaagaggatcatgcaaagttcgttaaggcagggcaacataatatgcttacttctcaagaaaacgaaccaggcacattgtttatgcagacaagtcatgacgaagaaactactaattttgtagtagaatgctatcaagacgaagcaagttatgatactcatgctaattcaaagcaatttaaggattttactgacgttgctaaagatattttaactagtcgagtaaaggtagaattgtttccggaatttatttctacaaaggcagaaaaactagcagttaccggatcaaatgattatgttatttatctgactgaaattggtgtttctttaggtaagggcgatgagtttgctcatgctgtaatgaaagaaatgaaaacggcagtcgaagaagaaaaagatattttggcaatgattgcaggaactgttgccgatcaaccaaatgaatggttagctattgaagtttatcgtaataatgaagcttacaagcagcacttggaaactaagaacttcaaagagtatttgaataatacaaaatattgtgttgaaagtaagagtttacgtaagttgcaaccagatgtaattgttgaccaaggtgcaattttctaccaaccataaagaataagacgaaaagaagaccaggctatgtggagtacataacctggtctttctagttagaggggaaaagatttattaacatatattattctggtttttagtggcgatgttttacctttgctactgctggtttattaattaatactgagctgatggccattaaaccaagcgttaaaaatgatccaccaattaagagtagtttaatcaaggttctcattcctttcatcttaattgatcttataatagcgaaataatattaagaatttatatgtaaaacctaatggattagttaagaaaataaaactagaaaaaaggctgaaactgtcaaatcttttgtgtaaatagttctttctcgtaaattgattttttaattatttatttaatcaaagtaggattctaaggtgtcctgaacctgaccaaagcctttatgaattcgattgaaataacggtcattgtagctcattgcctgaatgccaataaaagcatcaagcgactgttcagttggaaactctgccttaggcttagctttgcgcttgatcacattgttaaatgattcaatcatgttagtcgaataaattgaagctctgatctgcttgggatagttataaaagaccagcagatctggttctatgtctttcaagcttctgataacatggctgtaaaccttgccccatttggtatagaagtcatgcaggacagctgtggcttcttctttgtttgtctgttgatgcacctgtttgaattcgttcatgatcttttcacgatcgtcgacgcgtactttagcgcagatattgcgcatgacatgaaccaaacagcgttgaaaatgagctttaggataagtcctggccaaggctgttttcatgccaacaacaccatcagaaagaaaaagctcaacttgctttaagcctcgggatttcatgttttgaagcatatctgtccagacttcaatgttctcgctaggtgcaatgcagtagtcaatgacctccttgtgcccattaggcttgatgccaatggcaatatagactgcttcacgctcaaatgtttctcggcgcaaaggaaggtatgtcgcatccaaatagacgcagaaaaacttgtcgcttagcttgcgtttgtggtaagcctcaacctttggaatcatctgcttggaaatatttgatacctgagctggactgtaatggctgccatacatcttttcaattagatcggctatttccctggtggtcacgcccttggagtaaagcttgataatcatgctttccaagatatccgagtgctgcttgtagtcaggcagcgtgtgctgatgaaattgaccgttgcgatcccgaggcacttgcacttcaattgggccaaattgcgtatcaactttgcggaaataagcaccatttctagagttgccagtattccagccatttctggcatagggatcatagcccagaaaggcagtcaattcagcttctaacaagttattaacagcctgttgtagctctttgcacaataaatcatttattttgtctggattgaatagagcttgagcaaaatctttggtaaaatcattcatgaaggagttcttctttctgtatgtgtttttttgttcaaaccaatcatacgagaaaggaactcctttttctaatgtttaaagaaataaatttaaggaatcattcatccttacacaaactattttacagtctcaaaaggctggttagcacgtaaaatagaaatagagtcaaagtctagtgcaactgcgcataaaataaagcagtatcgatgggatgctgcttgttttggttaaaaaatagagaatatgcttgtagcccttttcgtaaatagcgttaatgttgtaaaatggaaagtgcattaagtttattaatgagaaaattgatgtattattgcaaaataggccgtaatggccctttttgttgtgaaaaaattaaaagaatataggattggaaatgccaggaatagtagagcaaacattattagaacaacaaaatattgatttaaatgaaatggtaacaatgaatcaaatgattgatcaattgttgcctaatgcaagtaaagaattacaacaaaaactaaagattaaaatttataactttgtgcgtacacgtaaacaaccaagtattactgtgcgaagaagaaaatattttaagccggctgttgctaaattaattattggtaatgtacaagattacgcagatgcaattgaacgtcgtgctaaggaagccccagctaaagaggatgctactgataagaggccagcttctaaatctaagcgggttaagacaattactaagcgtaagattttagctaaagttataaagaatgataagattgataaatctattcaaaagaaattagaggataagattgcttcaattgtgaagaccaactttattaagccagttaacaagcggggaagtttttcggttgaagatggtgaaaaagttatagctgaacttagtcctttttatcaaaatatcaagattgatcaaaagtatcgcaagaatgctgaaaaagcggctgaaaataaggaaacagaaactaaagaaaagcctgagcaacattctaaggatcagaatgaaagtcgtgaaggtcaatctaaggactttgagcgtaagaataatcagaagaatagcaataatcgaaataataataatcaaacgcaaaatcaacgtaagcgacaaaataagcatccttttgagatcagaagagaaaataataaccgctcacgtaataatcagtctaaccgccgctataataatcgaaataattatgataatcggaataattatgaatttgatgaagctagcggtttgcgtgaacgctacaatacagtaatcagaaattacaatcaactggagcaaagatataatgctttgcaagataaatataatcaggctttagatgataaagctagattgatcgaagaaatgggtaagaagaacgaagacttacgtcgtgtattgatcgacgttttgcgaaaaatgtagtttttggtaaacaaagagactagtagtcaatttgaattgattactagtcttattttatgtttatgaaatatgatttagcttaaaaattaaaaaaatatgtgtaaaaaattatttttgtgtagtaagattaaaggatgataaatatttttattaatgattaatggaggagaagtatgagtttaaaagagctatttaaaagcaatgtgtttcgaggaaactgtcaaatcttttgtgtaaatagatttttctcgtagattgattttttaatcttttatttaatcaaagtaggattctaaggtatcctgaacctgaccgaagcctttgtggattcgattgaaatagcgttcgttgtagctcattgcttgaatgccaataaaagtatcaagcgactgttcatttggaaactctgctttaggtttagctttacgcttgataacgttgttaaaggattcgatcatattggtggagtaaattgaagccctgatctgcttaggatagctgtaaaagaccagcagatcaggctcaatctctttgagatctctgatgacatggttgtacgctctgttccacttgtcatagaaggcgtgcaagactttgatcgcagcttctttatttggctgttgatggatttgcttgaattcattcatgatcttttcacgatcgtcgacgcgtactttagcgcagatattgcgcatgacatgaaccaaacagcgttgaaaatgagctttaggataagtcctggccaaggctgttttcatgccaacaacaccatcagaaagaaaaagctcaacttgctttaagcctcgggatttcatgttttgaagcatatctgtccagacttcaatgttctcgctaggtgcaatgcagtagtcaatgacctccttgtgcccattaggcttgatgccaatggcaatatagactgcttcacgctcaaatgtttctcggcgcaaaggaaggtatgtcgcatccaaatagacgcagaaaaacttgtcgcttagcttgcgtttgtggtaagcctcaacctttggaatcatctgcttggaaatatttgatacctgagctggactgtaatggctgccatacatcttttcaattagatcggctatttccctggtggtcacgcccttggagtaaagcttgataatcatgctttccaagatatccgagtgctgcttgtagccaggcagcgtgtgctgatgaaattgaccgttgcgatcccgaggcacttgcacttcaattgggccaaattgcgtatcaactttgcggaaataagcaccatttctagagttgccagtattccagccatttctggcatagggatcatagcccagaaaggcagtcaattcagcttctaacaagttattaacagcctgttgtagctctttgcgcaataaatcatttattttgtctggattgaatagagcttgagcaaaatctttggtaaaatcattcatgaaggagttcttctttctgtatgtgtttttttgttcaaaccaatcatacgagaaaggaactcctttttctaatgtttaaagaaataaatttaaggaatcattcatccttacacaaactattttacagtctcgtttcgagcctgcattattatcttattgtatgttttatacgcattatttgggagttttagtgaatatttatttaaatatgctctgaattcaattactgctggtaattttaatacatatgtttattggcaaataatgcagtttgttttagcattattcacttcgttgcttttaccaattactaccgttgttttcactaggcagacgcaaaactatctgcataaaattcggcaagaaatcatgcatcattactattatgaaaaaagtgatgaaaaagtctctagtatgcagaaccgattaacagccaatttaaaaatcttatcagatgattatgctacaccttggattactatcttaagtggggttttagagattgtgattgctattgttttactagcaagcatgaactggattctaattttggttactgccattttagctgtgattacactttttgctcctaaaattatggagaagaaaacatcagctgccacagataaagtaaataaaaagaatgaaaagctgttaaatacaattgctcattggcttggtggattgcaggaactacgtcgttatagtgcatacagtcgtttggttaagcaaattcatcgatcaagtagtgattatgtggacgcaagtaagggtagtgcaaaattaagaagtgtaagttatttgattaatgcttttagcaattcaattgcacaaattggtatgagctttattgctggaatcatatttttgcttaatatgatttcattcggtgattttgcagttgctagtggttttgcatttacgattttttcagcaatttggaatattactcagtcgttaacgcaagttaagtcaactaaggctttacgcgaacagattaccgatttaagaaagcaagttcctgatgaaaataaagataaagtatcagcctacggtcttaaagtttcaggcttgtctgtaaaatacgatcagggggaaacaattttttatcctgattttacaataaaaaaagggcagaaagttttgcttactggcgattcaggaacaggaaaatcaaccttgtttaatgttttgttaggtaagctaaaacctgaatctggtacggtgacctatctagatgaaaatgaaactatcattcctgaaggaaaagctagaattggcaatatgccgcaaaatccagtagtttttcccgcaacgatcaaagagaacattacaatgtttaacgaaaatttgcaggataagcttcaagatgttgttcaagcagttcaactccaatccgacttagccaaaatgccagatggtgttaatacaacaattgatctaaaaagtgaaaatttgtctggtggacaacggcaaaaagttgttttagcgcgaacggaaatacacgagcaatcgtttgttttaatggatgaagtaactagtgcgatcgatcaaaaagctaccgaaaaaatcattgatgaattgctcaaaacagatcaaactattttgatgattgctcacaactttacgccagaattaaaagcaaaatttgatcaagaaattaaattaaaaagtaagaaaggggataaagtaagatgaatttgaaagcttttattaaaaccaatccagttcgtttctggttaactgcaattggttggattattattcctgctttatcaattaccaatacttacgttgtacaagaagagacgaatatccttttaagtcgtaattggactaagtttattttaatcaatgttcttgcttttctgattatgttagttgactatggtgtgagtgctttagttgattatcagcagcaggctcaggtacaagacttaaatgatcaagttagagataaaattgttaagcgatattattatgacgggaaaaagcatactgttgcacagatgcatagactgtaaaatagtttgtgtaaggatgaatgattccttaaatttatttctttaaacattagaaaaaggagttcctttctcgtatgattggtttgaacaaaaaaacacatacagaaagaagaactccttcatgaatgattttaccaaagattttgctcaagctctattcaatccagacaaaataaatgatttattgcgcaaagagctacaacaggctgttaataacttgttagaagctgaattgactgcctttctgggctatgatccctatgccagaaatggctggaatactggcaactctagaaatggtgcttatttccgcaaagttgatacgcaatttggcccaattgaagtgcaagtgcctcgggatcgcaacggtcaatttcatcagcacacgctgcctggctacaagcagcactcggatatcttggaaagcatgattatcaagctttactccaagggcgtgaccaccagggaaatagccgatctaattgaaaagatgtatggcagccattacagtccagctcaggtatcaaatatttccaagcagatgattccaaaggttgaggcttaccacaaacgcaagctaagcgacaagtttttctgcgtctatttggatgcgacataccttcctttgcgccgagaaacatttgagcgtgaagcagtctatattgccattggcatcaagcctaatgggcacaaggaggtcattgactactgcattgcgcctagcgagaacattgaagtctggacagatatgcttcaaaacatgaaatcccgaggcttaaagcaagttgagctttttctttctgatggtgttgttggcatgaaaacagccttggccaggacttatcctaaagctcattttcaacgctgtttggttcatgtcatgcgcaatatctgcgctaaagtacgcgtcgacgatcgtgaaaagatcatgaacgaattcaaacaggtgcatcaacagacaaacaaagaagaagccacagctgtcctgcatgacttctataccaaatggggcaaggtttacagccatgttatcagaagcttgaaagacatagaaccagatctgctggtcttttataactatcccaagcagatcagagcttcaatttattcgactaacatgattgaatcatttaacaatgtgatcaagcgcaaagctaagcctaaggcagagtttccaactgaacagtcgcttgatgcttttattggcattcaggcaatgagctacaatgaccgttatttcaatcgaattcataaaggctttggtcaggttcaggacaccttagaatcctactttgattaaataaataattaaaaaatcaatttacgagaaagaactatttacacaaaagatttgacagtttcgtaatcgggactttctgtattgaaaaaatgaagagataatttgttattgatctcaatttttaaatcttttttgttaacggtaagcgtataacagtgtcgtttgcagataaaaccatttcttaataaaaaatctacgattggattttcatttgaatcaatcatgacttgcaatgcttggtgctctgcttgaactatttttgaaaatggaatatttacagagtaatcacttagattgaattttagataaatatatttgttatgaaaaagattgtgataagtagaaatagtgcctagatgcttatcgttatcagttactttgtagattttaggagatattttttcaatttttgtagtcattttttatccttttgataattgaaattaatttttgatcggttccgtttttaattatgaagttataaatcggttcataattgagcacagggaaaataagatcaggatcaattttaggtataatgtcaatcattgatttcttactaattacgttgagatttttaacttcttgagcatttcttatctttctttttgcttgtgaaggaggataaccttgtccccaaggctgttcaaaaagattttttatagtctgctcaaaattgatttcaccactccaaccccaattaagtcctagtggaaaggagacaacattgccgttattgatatgaccaaaaagaaaagcatcttgtggagtggggatataaccacattgaatattaggaaaagtatttcatgcaagcatcattccttgtccagaagtacatcctgtcacaatgaagtcagtcgccttgctattaattaataatgcgacagctagggaaacttgcacgtaagatagactagccgaactatcttgataaataccaaaattgaatacttgatcattggatcctacagattctttgatatacttctctaatatgaaatttttacttttttgcgatgtagcttgaataatacctattttcatatttttaacctctatagtttatttttttgaaagcgctttataatattatataggaagtaaagtaagaaggtgaacgtgatgaaaaaaattattgttggaactcctgttaaattgagccatgttttaatcggtatgattgtggtagttttactttcactatttttgacaggatttggttatcaagcttggtggctattccttattgtactaattttaggtgtatttgtaactttacctacttgttttaatccgtattggcagattagtagcgaaaatattacaattataaattatgatattaacgatgtgataaaattgatgcaactgctagggttacataaaaagagtaagcaagttattaatttatctgatgtaaagaaagctgccgttgtctatcgtaaaaatgtacgtcttagtcctattgactttaatcctgattatttaaatttgattttggatttaggtaagggaacaaatatgactttgacacttggaaatgtcgactatcagcaactaaattcgattatgggtttgttacaagataagaatattgtagtagatgataaacaaaatattttgcaacttttaagagaaaataaaaacttgtttaaccattttcacaagaaaggctggacatcgctataaatggataaagagcaaataattagaaattattttcgagcatggctaagtcctaatcttgaagtagtccaaaatacatttgacgaaaatgctatttatagtgaatgctatggtccagtttacagaaataaaaaggagataatatcttggtttgaaaattggaataaacaaggaaaagtaattgcttggccaatagaaagactcataattaatggtgatacgagcattgccgaatggcattttaaatgtaattatcaaggaaaaattagtgaattcgatggtgtatcaattatagaatttaatgatcaaaataagataatttctgtaaaagaatatcaatcaaagtccaaacattattatccctatagtaaataagacttttaactgttaagaggttaaaagtcttattttgaatatgaaatcttttataaactaatttctgtggaaaaaattaccaagccagcttcgtttctttttagcctcttcttttcgtcgctgttcacgatcttctaacattgccttagctagcatatcaactgtttgagtcaattgtgcttggttatctctttgttgcttatctctaaatgaactactgttttgatacttattcattaacgtatcatcatcaagccatttatcaaagttttcaacatcaataataaaaccggtgctagtttgttgcgatgcaatgtgatattttctaggcaaatatttaaagtagcgatcaagcatagtagaaccgctgtttttcgccgtttgatcggagattttattgaaaagttctttattgatttgggcttttagccggtcatcttgtttaataaataagatatcgcttccgatttttgcttgattgattaacattccccaatcatttcgaccaacaaatagggagtaatcgtaattttcttcaaaatatttgctgacttggttatacatatcaaatttatcaagtgcagtttttaaaacatgcttgattggatataagaagtctctttcaatcttctgcgcatcttcaacactaacgttagtaaagaattttgctaattcaacttgacaatatttaaaaagatcatcatttgcacgactaaataagctagttaatgcagcattacgttgatcactttcacctgaaaaagtagattcaaagcttaaataccataaacgacgcataatttcaggctttagagaaaattgtgatttaatagagctttcttgtctattcatcgtgaaaatgaatgctggtgagggatgagttaaattacgattgttagtaacttccttgatgaatctttcaaagtaagtacgggttgtaagctcgggactgacatcatcaatcattaatggacttacaggaccatttgtatatacatagtcacttagcgtgttggtaattgtcatattgatattactcttgccaagggcataattctttggatccatcattccactatctaagaaattatgagcaccaattaatttagcggctagtcttttccctagggtggacttaccagttcgaccttgtccgattagtgctgtagcaataggcacgtcttctctagatacattgcttccagataattcatataaattgcggattttccaaagccatggtgattcatatagaaacagcataaagtcacaagcttgccagccttcaccaacttctttgtaagtattatattcatgagtgatatcacagaaaagttgaagcgcattttttaattgcccttcagttaaatcagaagtaataacttcagaagggatgttatcaccaattttagaggcttggaataattgaccattattgtaaaactgaacaggaacagggaagagatcttcttctttttcaatttgtgatgtatctgcttttgcctttttgtcttgacgaataatgtgctgagtcaagctatataaatcttgcccgattgtatctagcttacgtcttttattgccaccttcaccaaataaagtaactgtttgagaagcaacgagtttttcattttcagataatttctttaattcatcatctttgctgtagtggtcgcgatacttttttatctcttcagctgggagaataattatgtctttaccagttgaattaggactgtttttgatttcaagagaagaatcttgcattacatgaatgcgaagatcgtctttatttttgtcttctaaataaccagatagttttttagcattaatataagttgtagcctgattaaggttatcttgaaacatttgttgatagcaattgaataatggatcagaagtattgccgtaatcccaaactaattgttccatatttttattaacagccgtatcggtaagattcattgaacctgaaaaggcagagtacttgctttgattttccattaaataaagcttagtgtgaatcaaattctgtttggtgaaaaaaagctgtaaactaccatctaaaatacgtttagtgaagggactatcttggtgttcgtagctatattcaatcaaatcacgacgtttatttaaaatttggtcaattcttttgccaattgaatttgatccattatcggttagtccaagaattagtgtgatctggtcaaaacgtggtataagattttgctcaataaatttaatattagaaacaaaggaaacgcctttaaactcagagaatttatttgactctctttgaaaatcaactaattgccaaaaatcggcattggaaattagtttttgatcagtatgatttagtatttctaatcccatataaaatcctttcgtgagtatacaaacatttgcttttagtgtatcgtgaaaaattggattagagcaaggaaaagttaatttattattgaatttatgaattagattaagtaaaatctgattcaaataacggaagtaaaaatataataatacgcgtggtgctagttaaatcgttttagttaataaaaaagtccaatcggactagactcaagttgtagtatcaaaaagaaaagagtctgatctgattgaactgccttaagcttaagcgttttagccaccatttacaagttagttttaaagatttagtgataatttgtcggcactggtatcgtttgtatgcaccggctgagtttactcatcggcgaaatattgatcaaattaaaactacggacagtctgattttggctttacttatctggcaagctaagacaggaattgaatcacaaagaagattctgtgaatgtttcaattgtttatcacactcacgttttaatcggcgttcacgtcagctattgcaattgatttatcagatacggcaagaaatgaataaaaaggttgacctgaatggacatttcttgatcattgacagctttccggtacctgtttgccaaccaattcgcaactatcgtgctaaaatttttcgcggttatgccaacattggttataaggccaccaagaaaatttacttctatggtttcaaagttcatgccattgttagcgatgacggttccattcttgattatgtcgtaacaaaagcatcagttcatgatgccaaggagacagttgaactgctggaaaatgcccatccatctaattactatcttcttggcgacgaaggctatttaggcaaagaactgcatcaacagctaaaacaaatgggttatgaactttggacaccatatcgtaaaaatatgacaggagctaaaaagcacaatgatcatcaattgatggctattcgcagaacaattgaaagcgacttttcgcttctgacctattacaatgccgagaacaatcgagcacgtagtctgataggctttcaaagccggttggaaattgcaattttagcttataatttggcttattgtctagaacgatttaactagcaccacgcgtataataatatgttatcggaaactgtcaaatcttttgtgtaaatagttctttctcgcaaattgattttttaattatttattcaaaataagattctaaggtatcctgaacctgaccaaagcctttatgaattcggttgaaatagcggtcattgtagctcattgcctggatgccaataaatgcatcaagcgactgttcagttggaaattctgccttaggcttagctttacgcttgatgacgttgttaaaggattcaatcatattggttgaataaattgaagctctgatttgtttgggataattgtagaagaccagcagatcgggctcaatttccttcaaacctttgatgacattgctataagctttattccatctggcatagaatttgtgcaagacagctgcagcttcttttttgcttgtctgttgatgtatctgcttgaattcgttcatgatcttttcgcggtcatccacccggactttagcacagatattgcgcatgacatgaaccaagcagcgttgaaaatgagctttaggataagtcctggccaaggctgttttcatgccaacaacaccatcagaaagaaagagttcaacttgcttcaagcctcgggatttcatgttttgaagcatatctgtccagacttcaatgttctcgctaggtgcaatgcagtagtcaatgacctccttgtgcccattaggcttgatgccaatggcaatatagactgcttcacgctcaaatgtttctcggcgcaaaggaaggtatgtcgcatccaaatagacgcagaaaaacttgtcgcttagcttgcgtttgtggtaagcctcaacctttggaatcatctgcttggaaatatttgatacctgagctggactgtaatggctgccatacatcttttcaattagatcggctatttccctggtggtcacgcccttggagtagagcttgataatcgtgctttccaaaacatcagagtgctgcttgtagtcaggcagcgtgtgctgatgaaattgaccgttgcgatcccgaggcacttgcacttcaattgggccaaattgcgtatcaactttgcggaaataagcaccatttctagagttgccagtattccagccatttctggcatagggatcatagcccagaaaggcagtcaattcagcttctaacaagttattaacagcctgttgtagctctttgcgcaataaatcatttattttgtctggattgaatagagcttgagcaaaatctttggtaaaatcattcatgaaggagttcttctttctgtatgtgtttttttgttcaaaccaatcatacgagaaaggaactcctttttctaatgtttaaagaaataaatttaaggaatcattcatccttacacaaactattttacagtctctgttatcgctttggagaaaattatgacaacagtatattttgtaagacatgctcaacctgatttatcagttcatgatgatttaacacgtcctttgacagaaaaggggttgcaagatagaaaaaaagtaactgattactttagagataaacacatcgaccaagctttttctagtccattcaagcgtgcaattgatacaattcaaccagttatagacgagaagaaactaacattatcatctatttctgactttagagaaagaaaaattggtgatgagtggatttctaattttcatgaatattgtgaaagacagtgggaagattttgattataagctaagaaatggcgagtctttaaaagagacgcagaagagaaatgttgctgctttgaagctagttttgtccaaatatcaagatcaaactatgattattggtggacatggtacagcaattggatcagtaattaattactatgatccaagctttaaatatgaagcctttgctatgatccagccaaagaatccatttattgtgaaaatgaactttgatggagaaaaatatttggagtataaagtagttactttttagtaaaaagataatctcataaagtaaaaatggtaaatcaaggtactaataaccagatttaccatttttttatttgttatattatagcttatgttaaattttatcctgagcaatgaaattatcataaatggttttgataactacttcttcatcttgccgtctggtaccaatcataattgagatttgggatgcaccctggttaatcatttgaatggagatgttctttttaccaagagggtaaagcaagctagcacataaagtcagcttgtccttcatcccttcacctaccaccattgtgattgcataatcatcaatccactgcatttgatcaggatttagactagtttgaatttcattacagataacatcaattaattgatcagttaagacatcttttttgaaaataatggtaatatcatcaattccagatggcatatgttcatatgaaacatgatgtttttgcaaaatttccattaacttcaaggtgaaaccagcacctttatttaacatatattttcttaaataaagggccgcgaagtttttgcctccggcaatacctgtgattgtgtgtttaggtataaagccgtcctctggtacgatcattgtcccaggtttttctggagcattagtatttttaacattgacaggaatttcgccttgaatagcaggaattaaggcttcatcgtgaaagacggaaaatcccgcataagatagttcccgcatttcttgataagtcattcttttaattggcttgggctgatcaacgatatggggattggctgaaaaaatagcatcgacatcggtgaagttttcataaagatcagcgtttaaccccctagctagaatagcaccggtaatgtcagaaccaccgcgagagaaagtagcaatatgtcctgatggtgtaatgccatagaagccaggaaaaatgatcttttcatcttttgcagccttaattctttttaagttcacataagtttcaggattgacttcagcattattagaagtgccagtgacaattaaacctacatcttttggctctaaaaatcgtgctttaattccttgatgatttaaaattttagcaatcaaaattgcattaagacgttctccgtgtgctttaaaggttgccatgcggtagtcattattagggtaacttagcttcggcaatgtaagtagaagctggttaatatcctctaattctgcttcaggcagctcaaaatattgggcaattaattcataacgcttaaaaatacgggtagcgatgtcttgataattattactcctcaagctcatatatgcgtaagtgatcattagatcggttactttaatatcatcctcagttcttttgcccggtgctgagactacaacgacttgtctttcgggatcggcattaataatacttagggccttatctacgctattacctgaggctagggaagaacctccaaatttaacaactttcatatctatttttccttaattattatttcaaatctaaaattgaactgatttctttttccatatcatttggttcaataattttttcggtcttgggttcacgatcaaaaagggcacgcacaccgattgataattgaccgcctaattcatcatgcaattctttaattgcaccgacgccagtttgcatactaggaccaccagtgatggcttcatacaccgtttctgggaacttatatggactggctgttgaaacaatgaccattggggtttgatcgccggtcttcttttgatattgatttgctacaaaagagccaacagcagtatgtggatcaattacatagcggtcataattgtagacccgtttgatttctgatttaacctcttcttctgttgcaaaaccagctgcaaaatttttttgtaatttagtgaaaacttcaccgctaacttgataatgaccgcgttgagtcaattgattcattaaactagcgacttcatagttattttcgccataaaggtcaaataaaagtcgttccaaattgctggaaactaggatatccattgctggtgcattggttaaatggaacttacgtcgcttatcgtagacaccattattaaagaaatcagtcaatacattgttttcattagatgcacaaatcaactttttaataggcaaacctaatttcttagcataatatccagctaggatgtcaccaaagttacctgttggcacagcaaagttaacttcgtctcctagtttaatttcttgtctgcgtactaattgtccataggtgtagaggtagtaagaaatttgcggaaccagacgaccaatattcatcgaattagctgaagaaaattgatagccattagcattaagtcggtttttgaaagaatcattgttgaagatttttttaacttcagtttgagcatcgtcaaagttacctttgattgcaattgcacgcaaattgttgccgcgttggctgagcatttgcttaagttgaacaggactaacgccaccttcaggataaaagactatgacatcggtacccttttgattagcaaagccacgcattgatgccgtaccagtatcgccagaagtagcggttaaaataataatatctttatcaatcttttcaatttgaacagctctggtcattaattgtggcaacatttgcaaagctatatctttgaaggcaagggtaggaccgtgaaaaagctccatgtaaaaatggttatcgtgcttttcgattggaacaatgctgcgatcatcccattgttcactataagcgctttgaactgcagtggtgatttgctccttagtaaagtcatcaaagaataagctaataaccatggcagcgatttgcttgtaggaaagtttggataaatcttctaacttaaaattagcttgaggaaaggcaacaggcacgtaaagcccaccgtcttgagccaagccttgaataattgcttgaggtgcagttaaagtgttttcttttgaacctctagtactacgatattgcataaacaatcttcctatcttatgaaatattaatattataactattgtaccttgattagcacctatgatacaatcgtaaaaataagaaaatcattaaaaagaggataagatcaaatggccatcaaaattgcattgcttggattaggaacagttggttcaggtgttttaaaaataattaaaaataataaaaagaagattagacaaacaagtggtgaagaaatcatcattgaaaaagctctagtacgtaatccagaaaaacatcgtaatttagctaacgaagtgatgctaactacagatttcgattcgattttgcaagatcccgaaattaaaattatagttgaattaataggtgggcttcatcctgctaaggaatatattactgcagcaatcaatgctggaaaaaatgtagttacggccaataaagacttaatggcaacttttggttcagaattgattaatttagctgcaagtaaaaagtgtgatttaatgtatgatgctagcgttgcaggtgggatccctattttgcggaccttggctacctcttattccagtgacattatttccgaaattcaaggaattattaatggtacgacgaattatattttgtcacaaatgggggaaaagggactaagctacgaggaagcgctgaaaaatgctcaagagctgggctttgcggaggctgatcccactaacgatgttacaggtaaggatgcagcatacaagattgtaattttaagcaagtttgcttttggtactaagattagtattgatgattttactattcaagggattaataatctaaaggattttgacattaaacaggctcagaagttaggctatgtcattaagctgattgggattgccaaaaatattaatggtaaattatttgtagaagttgctccatgtttgttgccagaaaatgcgattatggcgcatattaaaaatgaactaaatgctttacaaattaagagccaaagcctaggaacagcagtattcacaggcccaggtgcgggtagctctgcaacggctaattcagtcatgagtgatgtgattactgaaataaaaaacgtagtgaaaaagaccaccggtcagccatttagtaatttctcccatgttatgcaattaacaagttcggaggatgtgaagtattcctattatttatctttcgaagcagaagagaccttgtttgatttgagtaaattactctctgatttggaaattccggttcgtgagattaaacaagtacaatcaagaattgtagttgtaaccgaaaatattagtcgacagcagctacaagatttagcgattcaagatcaatatttaaaagctagctataagattttgcagtaaaggaagggaaaaaatgattattaaagcaccagcttcaacggcaaacttgggtcctggctttgattcacttggcatggctgtttcactttatttggaagtagaagttttaagcttagccgatcgctttcaggtggatcatgtgatgaaaggaattccacatgatgaaaaaaatttaattgttaagactgcactaacagtttatccagggttaccaccgcttcatttacgcgttaaaagcaatatcccattggctcatggtttaggtagcagttcaagtgctatcgcagccggaattgaattggctaatcaaattggtaagctgggactatcagatgaagaaaaggttcaattaggagctaaaatcgagggacatcctgataatattgcaccgactattttgggcggcttggttgttggtgctgaagttaaccatcattttgatgcagttgaagcaccacttcctccatatgcgttggtggcttatgtacccgattataatttggaaactaagacagctagagcagttttgcctaaagaattagcttttggcgtagctacgcatggctcagcagttgctaatactttaattgctagtttgtttgctcaagactaccctaaagcaggagaattaatggaacaagatgtattccatgaagtttaccgagaaaaactagtgccagaacttgtaaaagtgcgggaggtagctcattcaaaacatgccttggcaacttatttgagcggcgcaggttcaacgattatgacgtggattgaagataaacatgtagctggatttttgtcgggcttacgtaaacatgatttaaaagatgagacattaatcttacatcctgatgaacacggtgttcaaattatccaataaaaagactgaccaagcggtcagttttttagtcgtcaaaggttgcagcaaaactatcaccatcgattagcattcttttagcattgacagcataccaataaggaataacttcagtgccattttcttgctctaattcacagtcggccatttttaaaatttggtctaaatttttagcactgatgttagggtagagcttcagtaaagcttcttgagtaatgccactttgtttaaagccactagtgggataattggcagaaaaaatatcagaaaaatcatctaagtcatatctaggcttaaattctccatcaaagtatttgatttcgatgttttcaatttccataaaggcaccaagttgttttgccatgtaagggaacttattagctagttgttcaacagtaaaaccattgtttgctttagttcgtgcattgggatccagtttaaaccaagcttcacgtatattatgactatcttttctttcaataagaaggtctttgactttttgaatagctgcattgtgtctgtttacggctttttgccagtctaatcgattaggatataactgtctatagcggacagacaagggatgatcgattgcgttgtagataaaattcagcttgtcagtggtataagaagttagttcatcgtcacgccacattaattcatagtaagaactcatgaaagacacctttctatttggatagactaattaatattaactgaatagtatcattttttgctccgattaacaaaagtgataaaaatgtctatttagattggtcagcagcaaaacttttgttaaaattaatgtgtttactattagtatttgctcaaaggatttgacaaactatggatcaacttgataagttcaaccgacgctacaattttctttcaaaattgtcagctgccttcttttattcaattgcggttgcagttgccttgaactttttttggacgccggggcatatgtactcgtcaggaatcacgggttttgcgcaattaattaatactgtaagtgaaagatatctaccgtttacattatcaacatcaatgatgtactttcttttgaactttcctttatttatattggcttggttcaagataggacataaatttactttcttcaccatcgttgctgttgttctaggttctatcatgatgcacgctattcaaccttggcagatgcacctggacccactggtttgtgcgatttttggtgcttcgatcaacggtattggaactgggatggcattaaagaacggtatttcaactggtggactcgacattattggtattgtaattaggcaaaaaacgggcattagttacggaaaatttaatatttttattaatttgattattatcgctgctgcgggatacatgtttggttggccacgtgctctttattccgccttgactatttttattaatgggcgagtaattgatgcggtttatacccaacaccagaagatgcaagtaatgattgttactcagcacccacagcatattatcgatggtattcaaaaccggatgcatagaggaattaccattttgcatgatgctgaaggtgcatacagtcatattgaaaagacagttttgattaccattattgatcgatatgatatgtatgatattcgccaaatcgtgcaaggagcagatccgtatgctttcatgagtgttagtgaagttgaaaaagtatatggtcgcttcaaggagcaagaaatcgtttaatggatagcccttaaaccttgatatataaggatttataaatgaaatttgaatcctaggggcactttgggagcaaaactattcaaaaagaagcagaaatgcttcttttttatttggagtggctttttgtaattatggctttattattggtctttgttaaaagtgattaaaaatgatattatttcgattgagggatgttgatatatcgtggatcatttagtgtattctccacgagtgtggaggtgatcctatcatcttgaagggcacgggagacaaggcagagtattctccacacatgtggaggtgatcctactgttaacggtgatgactggtatccagttagcgtattctccacgtgtgtggaggtgatcctactttgagctgtgtcaacgccacagccgtttagtattctccacacatgtggaggtgatccaagtcgttacatcagccaaaagatgaggcttaagtattctccacacatgtggaggctaaatagctgctctgaaaaatatgttctatagagtgactgtttttgtatattatttaaaaatattgttgatggtgcacggagattgcgttcacttatatagtgaaaagatgctaagaaatctaaaatagaatcgagatgaattggtaatctggtaatcgtaagaaggacttagctactaatcgttgtattcaattttgataacaaattaattaaagagcaaaaaatatgaagaattataaatttaataagtttatgtaaaaacagtgtcattaagttaggctattgattttggtgaaaaaacaattaaagcatcatttggctttagacggccagattgatgccctttttggcatatttttctaaatatcattcgcgttacacgtaaaagcgtgtgttgtatatagtgaaaggaggctaagagaatcggagctaagaggtgacaaatatgccgaaagcctataaaattaactcatactggcaaaaatactaaatggtcattaaagttctatcctaaaagagctttgttaactggtgttttgattgtgattgctatagcattatggaaagtgatttttaatggctaaatatacagaagtaaataaaaagtggaatgataaaaatgaggcccgtaagctttacattaataagaggtcaacgacgaaaaactttattttaaatcttgctatcgaagatgatttagaacagattgaaaaggatattgaagaaagacgcaataatttgtaaagaaataaaatgggatacatcaggtaataaaaagtgcatctcatttttatttgtatataatactagttaacttaaaaaagcaataaaattcaaataaaatggaggtatttcaaagaatgacagagaataataaacaagccaaaaccactgataccaaggcaaaacccaacaacgacacagcaatcttcgctggcggttgtttttggtgcatggtcgaacctttcgatacagttgacggagtagaaaaagtagtttctggttatactggtggtcatgttgctaatccaacatatgagcaagtctgttcaggtacgactggccatactgaagctgttgagattacctttgatccagcaaaaatatcgtatgatcaattgctaaactattattggcaagtgactgatcccacagatgcaatggggcaattccaagatcgtggtgataattatcgacctgtaattttttataattcacctgctcaaaaagaagcagctgaaaaatctaagcaaagattacaagctagtggtaaatttgataaaccaatcgtaactaaaattgaaccagctaagccattttatccagctgaggaatatcaccaagatttttataaaaaagatccacttagatatgcaatggaagaagctggtggaagagctaagtttatcaaggaacattgggattaataaaaagcagatcataactgttataagctgtgacctgcttttttactttcaatattttagattatgttaactatttctttaagttgcttttgataacctcgattggattgagccaagttccgttgttaacgttccaattcttacatggaaaaccatatttgtttatgtaatctttatttgtttgagtaacgccaaggtgtaagtgtgagccagttagcttaccgatcttttgatctaatttaatcttttgaccagtcttaacataaatgtcttttttcttattaaacccttcttggtaaacttcaacgtaattatcaggactaataacccagatgaaccagccaaggccgttgccataagcaacctttttaacagtaccttgatgaattgcatatacgttagaatgcccaacttctgaaaaaccaaaatcccaaccatcatgaaagtaggaaggtggtgtagtagaacgcatatagttagttatgccaaaagtttgtgcattatacattggacgaacaccatttttcttgttggctttaaacggataagcccacttgaggttcttgggttgaacttcagttgtattttgtgagtcatcaagcgtatcagcagaagcagtggtggttgataaaccaacgcttgaagttaataatgcagtacctaacaaagaaattattaatttacgaaatttcattataaaaagaaaccagataagttctgatttttatctcctctcttaattcacctaaactattgtagctcagcagttttacgagaaagttacaattaaatttcgattaataacaaaaagttagtatgagtatatgtgaatatgtttttaattacgagtctaggtatttttgaaatttctttactttattttgggatttacatagaattaaattaataacgtttacattgaatttagtaaatgatagtagacattaatttggctcaaaaataataatttggacgaaactgtcaaatcttttgtgtaaatagatctttctcgtaaattgattttttaattatttatttaatcaaagtaggattctaaggtgtcctgaacctgaccaaagcatttatgaattcgattgaaataacggtcattgtagctcattgcctgaatgccaataaaagcatcaagcgactgttcagttggaaactctgccttaggcttagctttgcgcttgatcacattgttaaatgattcaatcatgttagtcgaataaattgaagctctgatctgcttgggatagttataaaagaccagcagatctggttctatgtctttcaagcttctgataacatggctgtaaaccttgccccatttggtatagaagtcatgcaggacagctgtggcttcttctttgtttgtctgttgatgcacctgtttgaattcgttcatgatcttttcacgatcgtcgacgcgtactttagcgcagatattgcgcatgacatgaaccaaacagcgttgaaaatgagctttaggataagtcctggccaaggctgttttcatgccaacaacaccatcagaaagaaaaagctcaacttgctttaagcctcgggatttcatgttttgaagcatatctgtccagacttcaatgttctcgctaggcgcaatgcagtagtcaatgacctccttgtgcccattaggcttgatgccaatggcaatatagactgcttcacgctcaaatgtttctcggcgcaaaggaaggtatgtcgcatccaaatagacgcagaaaaacttgtcgcttagcttgcgtttgtggtaagcctcaacctttggaatcatctgcttggaaatatttgatacctgagctggactgtaatggctgccatacatcttttcaattagatcggctatttccctggtggtcacgcccttggagtaaagcttgataatcatgctttccaagatatccgagtgctgcttgtagccaggcagcgtgtgctgatgaaattgaccgttgcgatcccgaggcacttgcacttcaattgggccaaattgcgtatcaactttgcggaaataagcaccatttctagagttgccagtattccagccatttctggcatagggatcatagcccagaaaggcagtcaattcagcttctaacaagttattaacagcctgttgtagctctttgcgcaataaatcatttattttgtctggattgaatagagcttgagcaaaatctttggtaaaatcattcatgaaggagttcttctttctgtatgtgtttttttgttcaaaccaatcatacgagaaaggaactcctttttctaatgtttaaagaaataaatttaaggaatcattcatccttacacaaactattttacagtctctcaagctgagtatccaaagactaaaataatagttgtcaaggctagttctaatcactatttacgtaatgagtttgatttgtataaaagtcgagaggttaatgattatcaccatgcaattgatgcatatttaactactatttgtgggaatctactgtatcaagcgtatcctaaattacggccattctttgtttatggtcaatttaaaaagtttagttctgatcctaaaaaaagaaaatgaaattttaaaaaagaccaaaaattttgactttgttgccaaacttttgggtagtaaagcaccaaatgagatcagatctcaacaggggaaagttttatttgaaaagaataaaattcgattgcaacttaataaggcatataattacaaatatatgcttgtatctagagatacgacaacaaagaatcaagagatgtttggaatgactatatatcctcgggctgaacgggatatagcgaagagtcgtaaattaattgaaaaacgtaaaggattttcaacagatatttatggtggctatactggtactgcagcagcctatatggcaattgtaagaattaataagactaaatcttcacagtacaaagtaattgctgtacctatgacgaagcgtgctattttaaataaagctgaaaaagaaggtaactatgaaaagattctaaagcaaattttatcaccaagtattttatacaacgataagggaaaacgaaaagcaggagtaatatcatttgatattattaaaggtaaagttccatataaccaggttgtgcaagatggcaataaaaaatttttgttaaagagtgctatttatttatgtaatgcaaaacagttggttttatcagaagaggcaatgagagtaattactggtcattggctagattctgataagcaagatcaagaacttttggatgtttacgatgaaattttagaaaagattgatagatatttacctttgtttgacattagagattttagaaataaattacataagggtagagaaaaattcttgaaattaaacgctgaggataagtttaaagctattattcaaattttgaagggtttgcatgataattctgatacaggtgaacttaaagatattggtataactgtaccatttggtcaacttcaaaataattctggaattacattatcttcggacactattttagtttatcaatcacctactggtttgtttgaaaaacgcgttaagatttctagtttataaaaataaatgaggaaccgacatgtggttcctcatttttacataaaaaaagtccctcgatagctcgggacaagtgttgaaactctgcgtactaaaacgcattgcttgattttaaattatgattgttagatcaataaggttaagagttgggagctacccaacaaataaataatatcattatagatatagatgtacaaggagaaaaaatgggatggcgtaacgtaataataactcagcatgcaaagctaacatactctatgaatatgcttatagtccaaacaaaagatggtattaatcaaatacctattgaagatatcaatttggttttaatttcaacatcacaggctgtgattactagtgctttgataagtaagttagccaaaaatcaatgcaaggtaatctttgttgatgataaatatcaacctgttacagagacagtgaattattatcctggggctagggacataaagaagttgaaaatgcaatttgaatggaatgaaagaagaaaagaaaatttatggaccaaaattgtagctgctaagctaaaaaatcaaatatcggtgttaaaaaattatcgaattgatgaaactgaagttgagcaagagctgtacaagttagaggtgaacgatttatccaatagagaagcagcggctgctagaaaatatttcatgaagttatttggtaaggactttattagaagaaattccggagtgattaatgcagcactagattatggatactcaatattgctttcatccttcgatagagaaattgcaatgaatggatatttgacttatctgggaatacatcatcattcagtggaaaatcaatttaatttagcttgtgatttaatggaaccatttagatccatagttgattattgggttaaggcacacgaaaatattaccagttttacaccagatattaagtatggattagttgagttgcttagcttacaaataaaattcaatggtaggaatacaattttaacgaatgcaatttctgtatatgtaagaagctgccttagatatttaagtggagaaacagatgatattagaatagagatgagtttgtgtaatgaggtaccgaatgatgcgattaatgataatgtttgatttgcctacggacactgccgctgaaagaaaagaatatcgacaatttagaaaagctctaataaatgaaggatttttaatgattcagttttcggtgtatgaaagagtatgtgtcactagacaaacagctaattttttagaaaagagaataagaaaatttatgcctagcaaaggtgttgtgcaaagtctaatggttacggaaaaacagtacagtgatatgcatttcttggttggggatgcagtaaaagatattcgcaatacttcagacaggacagtgatactatgattgtttcctatttgtcacataagaaaatctgtttaaaagatggaattaatgttatttgcactcaaagtcccattgcctataaagatctggttttaggttttcaagccttaaatgatctaatagtatgttctgatgacgaatacaacaataagtctattagtaagagttttgattttgtaggagccccgttgttaaatgacaatattatggcaaagtatatgaatgtcattattaagaactttatttctaacttggatgaggtaaacagaaatagaattttaaaatctttttattcattagaaacagtattgaatgattctttgcttttggaagatttacctttagaaattgattttagcgaagatattaaaaagctgttgaaaatggttaacattcatttagatgctcaattaatgttaacgagactgtaaaatagtttgtgtaaggatgaataattccttaaatttatttctttaaacattagaaaaaggagttcctttctcgtatgattggtttgaacaaaaaaacacatacagaaagaagaactccttcatgaatgattttacaaaaaatatagcacaagctctattcaatcaagacaaaataaacgatttattgcgcaaagagctacaacaggctgttaataacttgctagaagctgaattgactgcctttctgggctatgatccctatgccagaaatggctggaatactggcaattctagaaatggtgcttatttccgcaaggttgatacccagtttggaccaattgaagtgcaagtgcctcgagatcgcaacggccagtttcatcagcacacgctgcctgactacaagcagcactctgatgttttggaaagcacgattatcaagctctactccaaaggcgtaactaccagagaaatcgctgacttgattgagaaaatgtatggcagtcattatagtccagcccaagtatcaaatatttccaagcagatgctccccaaggttgaggcttatcacaagcgcaagctaagcgacaagtttttctgtgtctatttggatgcgacataccttcctttgcgccgagaaacgtttgagcgtgaagcagtctatattgccattggcattaaacctaatggacataaagaagtcattgactactgcattgcgcctagtgagaacattgaagtctggacagagatgcttcaaaacatgaagtccagaggcttgaagcaagttgagctctttctttctgatggtgttgttggcatgaaagcggccttgaccaggacttatcctaaagctcattttcaacgctgcttggttcatgtcatgcgcaatatctgtgctaaagtccgggtggatgaccgcgaaaagatcatgaacgaattcaaacaggtgcatcaacagacaaacaaagaagaagccacagctgtcctgcatgacttctataccaaatggggcaaggtttacagccatgttatcagaagcttgaaagacatagaaccagatctgctggtcttttataactatcccaagcagatcagagcttcaatttattcgactaacatgattgaatcatttaacaatgtgatcaagcgcaaagctaagcctaaggcagagtttccaactgaacagtcgcttgatgcttttattggcattcaggcaatgagctacaatgaccgttatttcaatcgaattcataaatgctttggtcaggttcaggacaccttagaatcctactttgattaaataaataattaaaaaatcaatttacgagaaagatctatttacacaaaagatttgacagtttcatgttaacaccatatgctataattgaaacagttcttaagattcatcaagaatataatcttgatagtattcccgtgttttgtaatgtagctcattaccttgatgaaacacagttaaaagaacttagtaagattgttagacaacttaaattgaaaattattttaattgaattcacagataagaaatatggggtagcagtcaaggatgctcaagttgcatatattgatcgagatcttgttgattggtattagacaattgattaaaaagatattatgaaatatcggttttagatgattgttagatcaatgaggtttagatcagtagtctccaattcaaaaggtgcttacgtgttttagatgattgttagatcaatgaggtttagatcaagcacttgaatcttgtccctgctaggaacgttttagatgattgttagatcaatgaggtttagatctcgaatttagaaaaatcaacattaacgcgggttttagatgattgttagatcaatgaggtttagatcccgtgaaaacggcgtttacatgcgtaagacgttttagatggttgttagatcaatgaggtttagatctattagcttttgcggcggtaccaacgtacggttttagatcaatgaggtttagatcccactatcgcgcctggaatacctgttttctgttttagatgattgttagatcatgggagtcagaacagtaatatgcataaatttacaaatatttttctgtaaataaaaatcgctctagagaaactctagaacgatttttggacatacttgatcttagtatctattattacttagcgtaatcatcaatacccaagtgctccaaaataagtgcggcagtttcttcaatggagcggtgagcaacattaattacatagcaacctaatttcttataaagtgcttgtgctgattcaagctccttgttgattgaatccatattagaataagtagtatcaggattcaaaccataagcgatcattctttgacgtctgatttcgttcaatacagatggatcgttagtcaagccaataatcttcttaggatcaatttcgtagatttcttttggaatgtgagtttcaggaacaagtggtaaattagctacctttaagttcttattggctaagaacaaagaaagtggagtcttagaagttcttgataccccaagtaaaacaacgtcagcttccaagaaaccttttggatctttaccatcatcatacattacagcgaattccattgcggaaattctgtcaaagtacttttgatttaagctatgctgtgcaccaattttttgatctggtgtcatatgagtagtttgttgaattgcttcaactacaggtgagaagatgtcaacacattcaacattatgctcacgggcaaatttgataactggcatttgcatttcatctttaaccaaactgtagataattaccaagtttggatatttttcaatttctgttaaaacttcgtccaacttcttttggttagtgataaaggggtaacgacgatagttgatattgcagttaggaaattctgcagctgcagctgtggcgttactaaaagcagtgtcaccagccgcatcagaaataataataatgtttaattcattttggtcttttgtttctaccatattaagctcctcgtgtattattaaatatctttctgaaaataattatactattaatgaaagcggattaacaataaaaactcagctcttttattaaggtaaagtagtcggtttacttaacttaaaaatttatcaaaaagtttttgaattgtattgaccctaaagattagtttggtataatttaagtaaatgtatggcgtaacgccaagaaatggaaggagggatcacacatggctaagacaatcgttcacgaaaacgagtctattgatgatgctcttcgtcgtttcaagcgttccgtttcaagaagtggtaccttacaagaataccgcaagcgcgaattctacgaaaaacctagtgttcgtagaaagttgaagtctgaagctgcacgtaagcgtagacattattaataaactactgagaaagctacctgtttttgggtagcttttctttttgacttcttgaagcataattttgattatgttaagtaaatatttgttagttttattttagttaagaacatagtttgttataatactattgggtttttaatagaaagaaggatattaaatgagtttgtcagatcaaatcatggctgatatgaaatcagctatgaagaatcacgacaagacaactcttaatactgtccggatgatcaaatcggccttaatgaatgaaaaaattaaagcaggacacgatttaactccagatgaagaattaactgttcttaatcgtgaaaagaagcaaagagaagaatcgattgacgaatttattaaggctaatcgtgatgatttagctgaagaaaccaaaaaagaattagcagttgtagaaaagtacatgcctaagcaaatgaatcaggatgaacttagagcagctgttaaggaaacaattgatgaagttggtgctaaaggtaagtccgactttggtaaggtaatgaaagctttaatgccaaagattaagggacgtgccgatggcaaggctgcttcgcaatcagttcgtgatcagctaaattagtagtaacaagaaggagcgggtctatttggctcaaacaacttttacacctcaaagaccagaaaatattcaaaaactagttggagttaatgacggaaatttaaagcttctttctgaaggttatgatctttctgtgtcagatgtcggtaatgagattgtcattgcaggagacgatgaagagaagatcaagaaggtagttgctgttctaaaggcactcgatagtgttgtgaatactggtgttaacatcggtgcgcccgacacagtaagtgcgatgaagatggctgacaagggtaccacagagtactttgcagacctatataaaaaggttttgattagggatgctaaaggtagacctatcagagtcaagaatatgggacaaaagcgttatgtcgaagctattgataaatctgatgttgtctttggaataggaccagctggaacggggaaaacattcttagccgtagtttgtgcaattgccgcctttaagaagggagaagtttctcgaatcattttgactaggccagctgttgaagctggtgaatcacttggatttttacctggtgacttgaaagaaaaagttgatccatatttgagaccaatttatgactccttgtatgctattcttgggactaatacgactgaccgtttgatggaacgaggcgtaattgaagttgctccacttgcttatatgcgtggacgaactttagatgacgcttttgtaattcttgatgaagcccagaacactacagatgcccagatgaagatgtttttaactagacttggatttaattctaagatggtcgtaaacggtgatatgacacaggtcgatttacctggtcgacagcatagcgggttaattgatgctagacatatcttgaagaatatcgaccaaattaaatttatcaacttttctgctaatgatgttgttcgtcaccctgtagttgcgaaaattattactgcttatgaaaaagaggacattaaacactaaaaatggatccaattgatattacttataatgatgaagttggctttttagatgatgaaaagcgtaactggcaagactggattatgaaacttttgctgctagctaagaaggaaattggcaaagataacaacttagagatgagtattaactttgttgacgaagatcgtagtcatgaaattaatttaaagtatcgtgacaaagaccgtcctactgatgtaatttcctttgcaattgaagatggtgaggattcaattgatcttgcagcatttgcagatgatccagactttcaagaggatatcggtgatctatttatgtgtcctagtgtgattaagcgtcacagtaaagagtatggtacaggttttgatcgagaatttggatatacaatagtccatggctttttacatttaaacggctacgaccacattaagccggatgaggccaaagaaatgtttggtattcaaggaaaagtgttagaagattatggtttgccattgtatcctgatcaattagatgaaggcagaggtaaataatggaagaaaaagagtttaagtctggctttgttgctttagttggtcgtcccaatgttggaaaatcaactttaatgaactatttagttggtcaaaaagttgccattacgtctaataaaccacaaacgactcgtaatcgcatttcgggtatttatacttcagatgaaatgcaagttgtttttgtagatacgccaggtatttttaagcctcattcaaaacttgacgactatatggataaggctagtgtatctagtttgaatgacgttgatttagttttattcatggttgaacctgaggaaatgggtaagggcgatcaatacattgccaacttgttaaaagaagtaaaagttcctgttcttttagtaattaataaagttgatgaaattcatcctaataagcttttgccaattatggattcatatcacaaacttgagggctttaaagaaatactaccgatttctgctactcaaggaattgggattgaagatctgcttaaaacgattaaggaatatttgccagtaggcccacaatattatggtgctgatcagatcacagatcggcctgaatattttgtggtagccgagttaattcgtgaacaaattctgcgactgacttcacaagaagtaccacatgctactgctgtcgcagttgatcatatggatactcatcaaaatggcaagctcttgattgaagcgactatctatgttgagaaagacggtcaaaaaggcattattattggtaagggcggtaagatgctcaagcagattgggattaattcacgtcaagagattgaaagattgcttggtgaaaaggtcaacttgcgtctctgggttaaggtccaacataactggcgttctgaccctaactttttaaagcgaataggctatgacaaaaaagaactttagttgaattactgttgtataagcgttgtcgaaagatgacgtcttttttgtatgtttagggagacaagaaaattctattcgttggataactaatgggataaaaatagatacaatagtaatgacaaagtgatgaaattttgggatctattgttttgtgattgttgttatattgggatttgtttactgtattctccacgtatgtggaggctgaaacccagtttcgaagttgattctgggtaaagtcttggtattctccacgtatgtggaggctgaaacagcagtctttttgtactatagactatttatgatattatgatatcttcatcagaatatctataaaaaatgaattttaaatactaaaggagtcatgatatggcacgtgaactaaaagaagttcagggtattatctttaaaaggcagaaatataaagaagcagatttattagccaaaattatgactaaacaagatgggattatgactctgattgttaaaggagccctgaggcctaaatcaagattaagtgcagcaacattaaatttttctattggtacttacgtaatttatacgagcgaaaagggcttaagtaatttacgcacatataaaggggcaaggcagtttgatggcttatataatgatttaaccaagaacgcttatatttcttttatttttgatttaattgatcacgcctttgtagaatatcagccaattggtaaatattatgatttagctttatttgctttgaaaaaaatagatagtggcgttgatgcagaaatgattacacaaattgtgcagatgaaaatattagcagcatatggtgttgagccacagctaaagcattgtgttatttgtggtaaggaaaaaggcgtttttgattattcgattaaaatgggtggagttatttgtagcgatcattttagtacagttactagccgaatgcatttaaagccaaaagaaactgctgtaattagaacaattggcttattaccgattgagcgattaggcgatattaaaattaatgaagaaacgaagagggctactagaaaagcgattgatcgtatttaccatgaaacgataggcctaaatttaaagactaagaaatttttagatgaattaaaactttttagttagtaaaaatctggttttaccatgacccatgtgttaaaataaaaacgtatttgacgatgatgaggatttaagaaaagtactagttcagcgaatgtcggtcggtgtgaggacatctaggaaaaggcacctctagtcatattgttcaattaagagcaggaaggatacttcctgaattagggtggaaccgcgataatatttcgtccctatgcaaaattttgcataggctttttttatggcctagcgcaggaggagattaaaggaaatggcagataagaaattaaatattcagaatatgatctttaagctggaacaattctggtcctccaaaggttgtatgattatgccttcatacgatgttgaaaagggtgcgggtacaatgagtccttacacttttcttcgtgcagttggtccagaaccatgggcagcttgttatgtagagccttctagaagacctgcagatggtcgttatggtgaaaaccctaatcggttattccaacaccaccaattccaagttgttattaagccagctcctaaggatattcaacaatattacctagacagtttgaaagttttaggtatcgatcctttggaacacgatattcgtttcgttgaagataactgggctaacccatctatgggttgtgctggtgttggttgggaagtatggcttgacggtatggaagttagccaattcacatacttccaagttgttggtgaattagatgttaagccaactatgagtgaaatcacttacggtgttgaacgccttgcgtcatatattcaggatgttaactcagtatttgatcttgaatggggtaatggcattctttatcgtgatatcttcaagcaaccagaatatgaacattctaaatatgcatttgaagaatcaaatcaagaacaattgcttcaattctttgatatttatgaagcaactgctaagcgtttattggataagaacttggttcacccagcatatgattacattttgaagtgttcacatacttttaacttgcttgatgctcgtggtgctgtttcagttactgaacgtgctggttatttatcaagaattagaaatcttgcgcatgaagttgctgtcaaatttgtcgaagaacgtgaaaaacgtggcttcccattgcttaaaagtgcagaagacaaaaaggcgggggtagaaaatggctaaagattatttatttgaaattggtactgaagaaatgccagctcacgttgtaccacgcagcgttaagcaattagctgacagaacaagaaaatttttaaaagaaaatggcttgaaatttaaagatattaagactttttcaactccacgtcgtttgactattttggttgaagatttggctgaaaagcaagacgatattgatgaagttaaaaaaggtccagctaagaagattgctcaagatcaagatggtaattggactaaggctgctcaaggatttgctcgtggccaaggaatgactacagacgatatctattttgaagaacttaagggtactgaatacgcttatgttcacgttcaaaaggaaggtaagaaagctagtgatatcttacttggtatgagcgatatcattaaggcgatgactttccctactaagatgcgttgggattcaaatgattttgagtttgttcgtccaattcactggcttgtttcattatttggcagtgatgtaattcccgttaagattttggatattactgcaggtcgtaaaactcaaggccatcgtttcttaggcgattcagttgttttggccaatgctgatgactatgaagatgcattaaaagatcaatttgtaattgctgatgcagatgaacgtaaagatatgatcgttcgtcaaatgaatgaattagttaagaagaacaactggcaagttaaaccagatcgtgatttactagaagaagttacttatttagtagaatatccgactgtatttgctggttcatttgatgaaaagtatttgaagattcctgatgaagtgctgattacttcaatgaaagacaatcaaagatactttgaagtctatgatgaaactggtaagttaattaatcactttattgctgttcgtaacggaaataaagattaccttgataatgttatttcaggtaatgaaaaagttttagttgctcgtttggacgatgctcaattcttctatgatgaagaccgcaagtatccacttagtcattttgttgatcgtcttaagaatgtttcattccacgataagattggttcaatggctgaaaagatgcaacgtgttcgcatgattggtgattacttagctaagcgttgggatttaccagagaatgtagtcaaggatttcgaccgtgctagtgaactttacaagtttgacttagttacccaaatggttggtgagtttgcagaacttcaaggtgtaatgggcatgcattatgctcgtcttgcaggtgaggacgaagaagtttcagttgcaatcaaggaacactacatgcctgccactgctgaaggtccacttcctgaaactacggttggttcattattatcaattgctgataaaattgatacaattgtaaccttctttggtgcaggaatgattcctacatcatctaatgacccatacgcacttcgtcgttatgcatatggtattgtaagaatcttacttaatgagaagtggtcattaccatttaacgaagttttaccagaaatcattagtatgcttaatggtgtaactccagctaagctacctaagagtgatgctgaccaggaaattgcagacttcattcgtgatcgtgtcaagcaatacttacaaaagaatgacttcaagtatgatattattgatgctgttcttgcttcaagtcaacaagatccaagtcaaattttagcagcagctactgtattgcaacttcaccatgatgatgaagaattcaagccagtagttgagagtttgactagaattgataacatcttaaagaaggctaaatttaagagtaatactgctgttgatgaaagtctctttgatgataacagtgaaaaagaactttacgctggcgttcaaaacttgcaagatattgaaagtttggctgatctctaccaaggttttgttcaactgcaaccagtgattgatcaatactttgaaactaatatgatcatggctaaggacgaaaaggtcaagaataaccgattagcacaattatatgcagttaatgaattagcagatcgtttaggtgacttaagcaagttagttattaagtagttaatttagatagaaaaagggtgattcatatggctggacggattcctgaagattttatttcagaggttcgcagtaacgtcaatattgttgatgttatcagtcagtacgtttcgcttgagaaaaaaggcaaagactatattggtctttgcccttttcatcaagaaaaaactccgtcgtttactgtaaatgctgataagcagttttttaagtgctttggttgtggtaagggtggaaatgtttttaaattcttgatgtataaggatgatttaacttttcccgaaagcgtcgagcgagtagctgagtttgcccatattgctatgcctaatggatatggtcataatagtggcaccaaattaaatccacttatgcaaatgcatcaggatgccgttgatttttatcatcgtgtgcttttgactactaaagccggtgaacgggggatgcagtatgctcaaaagcgagaactagatcaagaaatattagaccattttaagataggctatgcacctaaggctgataatgttttgattacttatttacgtagtaaaggttatcaagatgatgatctagcacaaagtggtttatttgttcaagctagggatgggcagttatacgaccgttttcgtgaccgtttgatgtttccattggataatgaaaatgggagaacgataggcttttctggtagacgaatttctgatgataagaccgaagctaagtatatgaatagtcctgaaacggggatttttaccaagtcaaaggtattattccactttgcagaagcaaagaaagcagctcgtggtgaaggtcacttagttctatatgaaggttatatggatgtaattgcagcatataaagcaggggtgaaatcgggaattgcctcaatgggaactagtttaactgatgaccaaatatatttgttgagacgtattactcctaatatcattattaattatgatggagatgatccaggagtccatgccgaagaacgtgctgcacgtatgtttaataaagatggcaattttaatttaggaattgtagttttaccagaaaaactagatcctgatgaatacgtcaaaaaatatggcgctgagaagtatctggaagaagtcaaaggtgccttaacgccgactgactttttcttaaaacggttggaacaaaaatataacttagataatgaccgtgaaaagattgcttatttaggtgaggccgtaaaagaaattgcacaagtgcgcaatccagttgagcaagatatgtatactgaaaaattggcgaagtctagtggggtttctattgcttcgttaaaggcaaatcttgctaaagaaagacggcgaaataatcgggcacgcaatcatgtacgtaattctcaaagaaattcacctgattatccgatagacgtacctttacctggtgatgaagacgtgcctacagagcagtcagtagttgaaaaaaatcctagtcagaccagactcttgtatttatttattcattcaactgatgctcaaaaatatatgttagaagggcaatttcattttcctaatcaggattttgaaactctggcacaggattggttaaaatatgcggaaactcatgaaaatccacaaattgatgggttcttagattttattcctgagcaacttcaaggtataatagtagatgctgaaatggcacagatgccaaaagattctacaattcaagaagttgatgctttggttctagcattaaaaagacgcaacatctattccaggctgaatgagcttcaagctcaattacaggatgctaagcgcaaaaatgatgcacaaggaattattgcaatcactcaggagattattggattaaaacggatcttaggttaataaggaggctttttagtggcagaaaaagaaactacacaaaaactatctttggataagatggttaagcaagtcgtaaaagacgtaaagaaagataagtcgatcactgaagaagatttcactgctcgtttgattaagccttataacttacaaggcaaggctgtagatcaactagtacaagagtttgaagataatggtattagcattgttgatgaaaacggtgatccttcaaagttagccttaaagaaacaaaaggatgttgaaaaggctgaattaaaggatatgtctgctccatcaagcgtacgcatgaacgatccagtgcggatgtatttgaaggaaattggtcgtgtaccacttcttactgctgatcaagaaattgctcttgccaaaagaattgaatccggggatgaagaggcaaagcaagaattagccgaagccaaccttcgtttggtagtttctattgctaagcgttatgtaggacgtggtatgtcattccttgatttgattcaagaaggtaatatgggactaatgaaagctgttgataagtttgattatcgtctaggctttaagttctcaacctacgcaacttggtggattagacaggcaattactcgtgcgatcgctgaccaagcacgtacaattagaattcctgttcacatggtcgaaacaattaataaattgatcaggatacaacgtcaattgttacaggacttaggccgtgaacctacaccagaagaaattggtgcagaaatgaatatgccaaccaataaagtacgtgatattctaaaaattgctcaagaacctgtttcattagaaacacctattggcgaagaggatgattcacacttaggcgactttattgaggataaggatgcaactagtccagaacaacacgcttcttacgaaatgttgaaggaacaacttgaacaagtacttgagactttaactgatcgtgaggaaaatgttttgcgtttgcgttttggtcttgatgatggtcgtacccgtactttggaagaagtaggcaaggtatttggtgttaccagagaacgtattcgtcagattgaagctaaggcattacgtaagttgcgtcatccaagtcgctcaaatcaattacgtgatttcatggattaattataattatctatattaaaagagctaagttttacttagctcttttttattggactggatctttacctgctgcccttagattatcttcaatgattttcattggatttaaccaagtgccattatctttccaatagtatttgcatggcgtattgtcatgctttttatcaatgtaatctttatctgtcttagtaactcctaaatgaatgtgagagccggtcagtttaccaattttttgtcccaacttgactttttgaccttttttaacataaatatcagtaatactgaggaagccttcctggtaaacttcaacatagccatcatcggaaataatccaaatataaagtcctaaacctggggcgtatttaacacgatggacagttcctgcatgcacagcatatacggaagaatgtccaacttcactaaatccgaagtcatagccatcatgaaaataactcttgctaggatagactcgacgaatgacgtcagtttcaccaaacttttgtccagatttaaatttgattttcttttcatagagcttcttaaaagggtaaccccaagtaagatgaacgacttttttctttttagcagtcttctttttcttaaccgtgtgagtttgtggtcgtaaactattcagattgttttgccataagggaatagaggcaaaagctaaaatagcaattaaagcagctaaaagtgcaaacttactttcagtttttttcattaaaatagctcatctcgctttccgtcaagcatatgttcactaattgtttgttcaaaaaatactggtaaatcatgatcaaaattgtaagctaacttttgctttttcaattctttagcactcatccaggttagtttaccttcgtctgattctttaacggtacccgaaaattgttcagctatgtagaaaaatactaaataacgttcatcattgtgatcataaaattgtttaacaccaactaattgaggatgactaatcgttaatccagtttcttctttgacttccctgacgacagaatcatgaaaagattcatgcgcttcaacatgaccaccaggaaaagtaagtcctggccagaccggatcgttgcgatcaagaactaaaacctgatctttgtttttaaccatgcacatattagttaatgtgacattttctgttctactcatgtaaaaaacccgctttctgtgacgattatatcaaatagtagcaaaataagactatgaaatatgctaaaatttggttaaccatatcttttatggaggaaacatgaatttaagattaaatacgttggcaaagatggtagatcctggcagtcgagtggctgatattggaactgatcatgcatacttgccaattgaattagtaaaaaatggcaaaattgattatgcaattgctagtgacgttgcagagggccctcttgaaaatgctaaaaatgatattgcagcagctgggttaaccgagcaaattgaaactcgcttaggtagtgggttagaaaccgttactcatgctgatcagattgatacagttgtgattgccggaatgggcggcaagttaatgactgatattcttgatagagcttggagcaaagatgcacaatttaaaactctggtactagaacctaatataggcgaagcaggggtacgtaattggctgatgatgcataattataagattatctcagaaaaattaattgcagaggctgggcatacttatgaattaattaaggctagcttaactgaagaaaagcatgagatgactgaaaaggaaatcttttttggcccctttattgtacaagaaaagaatccagttttttatcagaaatgggaaggccaactcgcttattatcaaagattcctggttaatttgaataaagcaagaaaaaaagacgaagatcgaatcaatgaagtagatcatgatattaaattaatcaaggaggaattggagaaatgaccaaagtaaaagacattgttgcgcgtttgcgacaagattttccggaaaacattgcttcacaaggtgatcctgttggtatgcaaattggatcaatggaggctgatgttaccaaagtaatgactactttagatgtacgtccccaggtagttgaagaagctgttgaaaaaggggttgatttcatcgttagtcaccatcctgtaatgtttagaccagcacaaaatttggattttgcgaatgcacaaaacgcaatgtatggcaatattatcaagaatggaattactgtttattcaattcatactaattcagataaagcccaagatggatctgctgattggcaagcagaggaactaggtctgcaagatgttgaaccattttgtctggatgatgatggaattgctatgggtagaaaaggaaagttacctagaacaatgactgcttatgattttgcctattatgttaaagaaaaaatgcaaattaaaatggcacgtctgattactgcaaacaatgaaaagccaattaccagtgtaggatttatttgtggggatggtggtaaatattggactagagccttagatgaccatttagatgcttttattactggggatgtttattatcatgtaggccatgatatgatttcatctggtttaactgttgttgatcctggtcattatactgaaaaactatttaagtacaaggtctatggtcgacttaaaaagtggaatgaagaaaataactggaatgttggaattgagctttccgaggtttctactaatccatttcaagacttattttaattagaaagagagttatatatggaatatcctaatttgttacctagatttttaaagtacgttaaagttaattcgcgttctgacgaacattcagatcgctttccatcaactgaaagagaagaaaacttccaaaagaatgttattatgaaagatttggaagaattaggtttaagtgacattcactacaatcaaaatgctggtagtgtaatcgctgaaattccgtcaaatgttgattatgatgttccagtaatgggctttttagctcatagtgatacggcagactttaattcagaaaatgttaaaccacagattcatgaaaattatgatggcgaaagcaaaattcaattaggagattcagagttttatcttgatcctaaagtttttccacatttgaagaattataaaggacaaacaattattacggcctcaggtgataccttacttggtggggatgacaagtgtggtgtgtcagaattaatgacttttgcggaatatttaatgaatcatccagaaattaagcatggtaagattcgattggcctttactcccgatgaagaaattggtactggtgctgaacactttgatgttgaagactttggtgctgactttgcttttactgttgatggtgaagctcctggtaagttagattggggtacattctctgcggcacaatttagtcttgatattcagggagttaatgttcacccagctgttgctaaggggcaaatgattaatgcaattcaagttggaattgactttcataatcaactgccagaacacgatcgcccagaacataccgatggacgcgaaggtttcttccatctaatgaattttgctggtactgttgataatgctcacttagattacattattcgtgattttgaacgtgatgggcttgaagagcggaagaatttggttaagtcaatcgttaagaaaatgaatgatgaattcggtactgaacgaattacacttaaaatgtgggaccaatattacaacatggccgatgaattaaagaaacatatggacatcgttgacttagcgcgcgatgcttataaagcagaaggtcttgaagtcaatgaagacccggttcgtggtggtacagatggctcacaattgacttatatgggcttaccatgtcctaatatttttgccggagaagaaaacatgcatggtcgttatgaatacacagttcttgagtctatgtggaaagctgttgacgtgatgatcaaaatggctgaattaaatgctgaaagagctaagtaagtgaaacatttttgactaaaaatatcaataattctatttctgatctaatatgagattattgatagattaggaaatagggtaaacatagttaataaataaaaattatacactaatactattaaaaataaaagatagtttataattaccgtcattataggattatagactatctttttgttgtacttttaacttttatgaacttgtgaaacaaagtgattaaacttagcccttgcaaaaagtgactaaagtaagtattatagttagtgtaatagattaataatacagtacaaaataggagctgagtaaatggaatttaaagataatattcctatttatcttcagattgaacaatacttgtatcgtcaaattgctttaggcaagttaacagctggtgagaagattccttctgttagaaaacttgctctagaattaaccgttaatgttaataccgtgcaaagagcactacaacagatgaacagtcaaggtattctttatactaaacgtggcgaaggtaattttgttactgaagatactaaactattatccgaaaccaagcagtcattaattaataatgaattagaacagtttgttcaaaatatggaagagtttggaataggaaagaacgagttagtttcaacgttagagaattatttaaaaaatggtggggatcagaatgaatgatttattagctattaaagatgtaagttataagaaaaatcagaagcaagtattgcaagatgtgaacttgaatttagctcctggcaagattgttgcgttacttggtgaaaatggtgctggtaagaccactttgatgcgaattattgccggtgtagctaagaattacaaaggcgaaattaatttagagggggcaacaaaagaggcagaaagaaaggctaagttgtcttttactgatggtttaactggcttcagcgattcaacaaagatcaaggaagtggttaaattttacgcaacgatttttcaagattttgatgagaatgaattcgatgagctgcgtaagtttatgaaattagatcctgaaatgaagttgagtcagttatcacgaggaatgcgtgaaaaattgattattgctttaacatttgctcgtaaagcagatttgtatttacttgatgaaccttttggtgggattgatgcaatggctcgaaagaaaattattaattccatcattttgtggaaagatgaaaaggcaacgattttaatctcagatcactttgtcaatgaaatttcatcattgcttgatgaagtggttattgtaaaagatcataccgttttggaacacaagtcagcagatgacattcgtcaaacgcataagtcaatcgaagaatactatgaaagtttttatgcagatgaggatgatgaataatgactagttttaacacattgtttaatcgaatgtttcaagaaaaaagcaagtcagtctatttaatcttcttaattcaagcctttgctagtttatgttttacaattattggttttgtttcggaaaatggtacaccagaatttgttaatggaaaagatactagttctgtcaatgtgattgttgcttttctcgctgtatttgcagtaatgatgctgataacgtcatttatcgctgattttgtttattggattatttcttcaatcaagaatgaaaaaattaatcgcagtcaaacttggcgcttgattccggtaactgatactaagtttttgcttagcaattttgggacagcatttttaacttatatttggttaggaattttagaagcggtcacgataatcgttacccttttgccgatgttgtctgatcaagatgtgcgcaaagcaataggtcaggctagcatccatctttcagcaagagactggcaaacaatgctcggaagtttgctgctaatcatttttattggctatgcttggtacgcaattgtaagtttgcttaacctagcaagccgcagcattattgattttttgccaggtggctcaagtaaagtatggacctttattattagagtaattgtaattattgcgattatttggattttaggccatgcggcaacaattatcttttcagtcttaggaaagtttagtccttttatggtcaacagccaggatattaactatgccactacgattcttcaattcttggtctttgatgttgtgattactttgatcgatatcttgcttttgaataaattcgtagaagcaaaacagaattaggagttttttatggcaaattttaagaccttgtttaagcaaatgtttgtgcaaaaaaggcgctacgctaacttagttttgttattacaagtttttgcagtcctttttttgctggtaatggctctgttagataaaagcaatttagcttatctcaacattagtaaggacagtaattggctagatcgtttgcttagtgcaggaatgctcgaaacgccgattgccgatgtgatttttgttggtctgctttgctggcaaaatgaaaaaatcaacctcagtcaaacttggcagctagctccagcttcaagtgtcaaaatctggctgattaatatgctttctagtttagttgaatgtatttatatttttgtaattcaagtcattttaggcttcgttgctgctatgattgataatttaagtcatcattattcactgcttcatgacttagttgatgctaaagttacttgggcagatgctagtttattaattgaatttctattgttcttaactggaacggttttagttattatgacttttgtcagttttgctaattttttgacgaaagtaattgttgatcaattgccagttaacaataatattgtcattaagttatttgtgatggcagtgattgtgattattgcaatcttgattgctgaacagctaaacgaacaaattactgctatgtatttgcatcgttttgccaaagaagcagcatatgatccattgggtatttcagtggttgagtactttgcaggagcaattgttttaggagcaatcgacagctacttaatgagtaaatttgtcgaacctaagataattaatcgttaattgaaggggaggggtagatagtgacgaatttttggaccttgtttaggcaaatgtggacgcaaaaaagaaaatttatttatttggttttcttaattaatatctttgctgtagtatttttatcaggttattttcttcttttcaaaaattggaatggtctagcaaatctgccgtctaaaaatttagggcaattctggcgcaataattttgtctatgtgactttatacattgattttgccttttgtgcgattacatgttggcaaaatgaaaaaattaatctgagtcaaacctggcatttagcagctagcgatgaacgaaaaacatacttagctaatatatttagcagtttgctggcatgtggttatttcttcttgctgcaagaaatcgttaatagtctgttgctgatccctagttgcggggcagacagttttgctcaagcatttcgtgagtttggtctgtatccaattaaaacagttcccggcgttgaaataactagcaatcgaatgcttgcttttcattggttgtttatcattttgataattttaatcatttacttctttgtcagctttgccaattttagttcgcgagtaattactgatttcttgccgtttaagagtacagtttgggctcgcttgttaattatcgcaattttggtaattgtcgcagcttactgcggcatgatctttatgtctaagttacagggctttgttgataagagtccaaatttacaagcaaccgatccaatctggttagatgatttatgcttgtttattgttagccttgttttcggtattttgaatctagtattcgtgaagaaatatcttgaaccaaaaatagattaattaatgcaaaaaaagagcttcatttcaatcaagaaatgaagctcttttttgtagttaactaagcatttgctgacatgtaatcataaagctgatttacttcttcggctgtgaattgtccatcgccaactttcatggcgtgaactttttcaactgagaggtgactagcaaaggctaggtcagtgtcattaacatggtgttttacttgaaaattgataattgcatcagataattcttcttgctcattcataataatttctccttaccctctaattttaatcaaattggaataaaaaataaaattttttgcaatttcattgattaaaatgttttccattgcgtaaatggccaatacctgaagacgactcggccaactaatgcgctgcgcttaacaaaaccgaagtaacgtgaatctttggaaacatcgcggtgatctcccatgacgaagtaactatccttaggtactcgcttttttaaagtgaaattgttagtatagagttcacctaatttatgtgactttctttggtagccattatttaaatatggttctgcaatttgtttgccgttaatgtaaagcttatcatttttagaagtaaccatatcaccaggtgtaccaataattcgcttgatatacagagcacctttttggtctggtgcttttagaatgacgatatcatttcgtttaggcgtaaaatgacgtacagcaatcaaacgatcgccattctcaaatgtgggctgcattgatggaccagatactgtttcatttgataggaaaaaactaaaaataaagtagtaaattcccatcaaaattgcaaacataataattatgtctaaaacaaagcggccaatgctttcatcatcatttctctttttggtttcaaccatagaatatctcctttgcttgctagtcttattataactgaattctccgccgttgaatggtaaaatcatattaaggtgtttaagtatgacaaaatttttgacgaaattaacaaaattagagcaagagataaatcatactgcggttaaacgacaagttgaagaaatagcattaattgatagttatgtacaagcaggtaagccattgaagcgggcaccacgcagattaggtttattgccagatgaatttgaagaagttttagttgaggtgggaccagataaagaaggggccttaagggatttaaataatttacttaataattttcggcaatatctctctttaatatatggcatctggtctctgcctaatattcagactgcgcagttaattaaaaataagctgcatgtacaaacagcgttagaaatcatggcaggcaacgcgtattggtctcaagctttgactcaggttggaattaaagttcacagtacagactcattagagtgggccaagacgtcgaccactggagctaagcctttttatccagtagaagatttaccagctgaccaagcaattaagaagtatcacacagttaatctagttctatgttcgtggtcaccaaatttcggtcacggagatttagaaactgtggcagcttggcataagtataatccaagttgtcatttgctctttgttggtgaaaaagatggtgctactaattcaccagaattttggcaccaaaattggtttaaaaatagtgcagctttagacgagattaatcattccttgcaaagcttcgattttattaatgaacaggtatttgaaataaaaaatgaattttaaaaagatatttttgttactgattcttttattatcttttttaggaattggaacaatgctctccaatattgaatctaattatgctgacgaattgctggaagcacacggcttaactaataatacccgctattttagaacagatagtgatgataagattagtactttcctaaaatatttggacaaaaattatgcgaatcatcaaattcaactgcatctagataataattatgaaaaaaaacaagtgcttgtttgggctaatcatgccgttactggcttgccaactgagagtggtcgctatttttcgcctgatgattttaaaggacaggtttcttttgtggtgctggggccaacagttaaacttaatttattagatgtgcagaataataaatatgttattttaggcaaaaattattattctgttataggcgaatttaaggactatccacaggtagaaatggataaatattatctaagtacaggaattgatcagccaactgctaaagaccagctcaagaattatcgaattgtagtagatgcaacacctgcagtgattgaaaagattgctaagcattatcatgctagtttgcatattccgtcttttgttcaagagcatcatcgagatcgtttatctgtcgtgccggatattttaatgttagttgtttgcctattggtcggaatgatcacaaatatgttgcttgcaataggaattaagcgtcaggctcgtttaacacgtctacacgatgatttgctgcgcaattgggtaattaaccgcagcgtacgtttatttttaatagaggctatttttgcccttgctacatacttctttttaagatggcatgccttttattcaacatatggttctttaatagttacattaatagcttcctgggttgtaattgtattggcgttttgtgggatggtctattacttagtgagaaaggacaggaaaattgctaaatctaccaaatgaatttaaaactaaatatgaaaaattattaggtaccaaaaaagcacaagaactatttgcggcgatgaatgaagagagcaaaaaagcttttagaattaatacattgaagcctactaaggtttcatatgagcttactgattcagtaccgcaaataaattcagcctattatggtgaagtatcgggggaagatcctgagtgggtaagcggtagtgtttattctcaagatccagcggctatgtttcctgcggcaattagtggtgttcggccaggagagcgcgtgctagatctgtgtgctgcgcctggaggaaaaataacagcattaggagaacaattgaagggtgagggccttttagtagctaatgaaatctctgcaacacgagtaaaggcactacgggaaaatattgaacgttggggcatcagtaatgccttaattactaatgaaagtccagaaaagttagttccaattttttcggaattttttgatgtgattttagtcgatgctccatgtagtggtgaaggaatgtttagaaaaaatccggaggcaattgattattggtctcaagactatgttttaacatgccagaaccgtcaaaaagagatcctcaatgaagctgttaagatgcttcaacctggcggacgcttaatttattcaacttgtacctttgcaccagaagaggatgagcagattgttagctggttaaataaagaatatggttttacaattttagatacagggatacaaactaataagattgatgttggacagcctgagtgggctgatgggaatcctgatttgactaaaacattacgcttttggcctcaagatggtataggtgaaggacaatttgtggcagttttacaaaaagtaggtaaagctagaattgaaaaaaagagcaaaaacaaaaaagccaagcgtgatccgtggcgcttaaccaaaaatgatcaggaactagttggtcaggtaatggatcagtttaatttaccagttgctttaagtgactggcgtaataaagcaaaagtccgtaatgaacatgtctatattcctgcaatcagtttgcctgaaaaaagtaagcttcatgtaattaataatggagtcgagttgggtatattaaagaaaaaacgttttgaaccaggacatcaattggcagaagtgctaggtaaggtaaagcaagaacgggtttatgatttaccgacaattgaagaataccaaaattatttgcacggtgaaaccgttaaagtggacagtgatttgcggggctttgtgttagtcagctatcaaaaattaatatttagttttggcaaaatcgctggtaatcaagtattgaagaacttttacccaaagggattgagaaaatgataaaactaattgcgacagatatggacggaacctggttaactgaccagaaagactatgataaagaattatttttgcgtgaatttgcggaaatgcaaaagcaggggattaaatttgtagttgctagtggcaatcaatatgctaacttaatgactcgttttcctgaggttttggataaaatttattttgtagctgaaaatggggcattagttgctcaaggaagacaaattttgcatgttgactcgttaagtgatgacatatatcaaactttattaaaaataactactgaatatccatatccagctgtagtgatggggctagtaagtgcttatgttaaaaagagcagtggacgagcttataaacaagaaatgaaaaaatacatggagcatattactgtagtagattcttttggagaaattgatgatcagattttcaaggtcagtctgacagtgccagaagataaaatgtctaaaattttgcgcgaattaaaagaaaaatatccggaggttggttttgtttctggtgcagcagactcgattgatatgcaaactaagggaatgaataaggcagtaggtctagcatatttgagtcaaaaattagggatcaaatcaagtgagatgatagcttttggcgatagcggtaatgatgtaggaatgctgaaatatgtaggccgtagttttgctactgcaacggcgttgccagaagccaaacaagctgcagggcaaattattggttcaagtaatgaaagtgctgttcaaaaagaaattgctaaattgcttgaaattaaataaggaaaattatgtaaagtaaaagcactagtaatcattaactagtgcttttactttacagtaactgatcgatttgagcctttaatggtaaattatagtatttttttatttgtaccagggatgctaaatcttttttgccgtaaacagcaattaaagcagccaattcatttttccaattagtaattaattgctctaatccagtactaccattttggatgtattcttgtaaaaaaacatttgaaataccaacaaattttcctcctagagctaaaccttttaaaatatctaggggattacgtactccaccagaaacataaaatttaacttgctcttgccatgccatcagagcagtcaccacagtaggtaaacctaaatcttctaagtatgaaacgtcactggcattacgtgcattctcaatctgggcaaagtttgtgccacccgaaccggcgacatcgaagtattcaatgccatttacttttaaaagatgaatacttgtttgatccaatccaaaaccgacttctttaataataatgggcaaatcgatagcggtacgaattgctttaattgaatcaagccaacgaaagtcacgatcaccttcaggcatggcaatttcttgtattgtatttaaatggatctgaagcgcatctgcatttaattcttggataatttgtttaattgcagagattggtgtttctggattaacattaacaattagtacaccatctggatcttctgctctggcaaccataaaactgtctagttgatcagtttccttagctaaaatgctggcagatcccaaagctagggcaatattttgctgctgggcaacctgtcccaatgcttgattaatttgtttagaagcagctgagccaccagtcatagcattgataaaaaaaggcgcagaaacatttttgccaaacatttctgatcccagaatagttggatcgacttttgtttcaggcagagcagggcgcaacaaatgcagttgatcaaaactattatatttttctttattaaaaaacatctgagctaacttcagatgttcttcttttctttcagatctaatcgacatagaactctccatcaatgagccatgataatctggtgaaccttaaaattaagaggcataattccattatggcgccattcgctttcaagtgcttcaacatcggtattagcatctgtaatcacaatgccacagtcaccattaccagcaccagaagttttagcagctccaccaaaattttctgcaattttgattaattgcgataaacgtggaatttcaatggcaatttggttaattttggcaaagtgctgcaacaatttacggttagcccgaatttgttgtttgattaaagcaatattgtttgcttcgaaaccttgaaccatctttaaaacacaagctctagaagctgctaagaaatttttatattccatattcaaagccgccttattagcgttagtttcatcaacgaggcgtgaagttgatgctggcttttgactccaaccaatcatcagtttcatatctttaggaggagttagtaattcaacttttaagccaggccaagcttcattaacgacttgaactaaagtcttattagctaattcttgctttaaccattttttgtcaaaagtttggtaagctaaccagccgccatagacactagctgcaatgtcaccagctgagccatttccttgaactgaatagtgtgaaatagccgataatttataaaccagttcattgctcatttttacgccataaaaacgcaagatagctttaactgtagctactgtgacggctgcacttgaacctaaaccatattttttaccatctgcagaatctaagtctgaattgacgtgtaaatcatagactttcatcttgatattttgctcaatacaatattgttcagtaaatgaaatagctgacaaaatatattcaaaagggttgtcacgattatcgattaccatttttgagccctgacgaacccaatgaatcgaatcctgtgagtattgcttggagtgaattaagccagttgcccctttactcttagtgattgacacacgtacaaattggttaactgctactaaaatagcaggacaatcttgctctaatactgcatattctccggcaatatataactttccgggcgctttttctgttatcaaaagaactaaatcctcgaatctaattaacttttttaattacaactagtccaaataagtaattccaggaccaaaacttgcattcactatattaacattattaaattcggacgaaaagcgttgaatgatatctttgctatttcttaattggcaaagtaccttaatatttggtcctgcatcaattgtatagtaacattcaattccttcagtacgaagttgttcaactaatttaatagcttgaatggtttgcggctcaaagtaagtgaattcaggctgtgcagttaaattaattgcatgcatttcatttgcatttaactcagctaactggcctagggcagtgaaatcattactttttatagctttgatcatttcatttaattctgaattgttgcgttcaagccagggcctgaaaaatggagaagattgggcatctttcataccataagtcgaagaaatctttttttgtttggtatttaattcaactgctaaaaggtgaagatccatcgttggtgtttcatctagtgcatatgcgtaagatgtttcgtcgctattacctttttgccaaacagcaaaaccgccataaacggagcggctggcagaaccagatccaatcctggctaaacgagataaatcttctagatcaatgttgatgtcatagcattgacaaaaagcagcagctagtgccgcaaaagcagaactagatgatgctaatcctgcagaagtagggacgtgattgacagatttaacgattaaattgccagtgacgtgaaaacgagcctgcaatttttttagataagcaaaaacacgttgactagctgcagcagtttgctgttgattatttaagaaaaattgattttcaccatctgttttttcaacgctagtatcagtataaaaagcatctaaagtcattgataaactagacattaaaggaagacgtaatttgtcgtcagctttgccccagtacttgattaaagcaatgtttgtatgtgctcgtgcggttctattcattaaatctcctcaatccagtagtcactaattaaatctttacatttagaggcaatttcttgggcgacagtttcgttatcgcacaaggaaatagtaatgccgccaagacctccgcctgataatttaaagcctaaagcgttatttgacaaggcaattttttgcagttggtcaattttatttgttgaaagatcaaatgagtgcaaaatttcttgtgcttcattaaaaatctgtccaactgcttgacgatcgtgcttgatccaagcttttttagtaagatccgctaattcacccaagcgagctatttttttcttggcatagtcggacttttcaagcatttttttaactaaaaaaacagcttcctttgtattgcctagttgaccagtatccatgattaacagggtagctcctaatttggtttgtaatattttaggccccatttttttattaaaaaaaactagataatctgaattaacagtggctgcatcaagaccagaagctttaccatgattgatcatttcagcatgattagttacagtcataatttctttttcagtcatattcagctgaaagaattggttcattgccctagtggtacctaatgcaacagtagcacttgaaccaaaaccatgttccattggaatttcaccagtgtatgtaattttaagtggatggttattgccagcctttttttgcatatgtttaactacgtattttaggccatcatattctgccggtgcttcaaataatggaccgtggtagcgagcggtatccatccacatttgagaagcagattcaacagtagttttaatgtgtaaagccttaattggcatagctaaagcatcatatccataaactactgaatgctccccaataataattaccttgccatgagctaaatagctgcttttcatttttaatcatccttaaactagatttatacaaaagattgcccttgctatgataaaataaaaagcaaggagtgcgaacaaatgatcaaaattcttacaggacgacaaaccgacccattacaagaaaaaattctggaagaagcagttgaaaactatcagcaacacccagaacaagaaacttttatcatcgttcctaatcatattaagtttaccacagaagttagggcaattaacaaattagcaacaagcaaacaacaaactgagactgcagttaaaaatttgcatgttttgtctttttcgcgtttagcttggtttttcttaaaagatgccgagcaaggattgcctaatcaactagatgatgcagctagtgcaatgctcttagctcatattattgagaacaaaaaagatgaattgactatttttgaaaatgttaatgttaattctggattagtaaatcagctttatcagacaattttgcaagtctatgacggaaatttagatttagacgagatatcagaggataatttagatcaagaaactaaaaataaattacatgatttgcggattatctatgatgcctttattaaagaaattgcgggtaaattctctactaagaatgaggttcagctgcaactaaatgaaattttagctaaaagtaaaaatttaaagcaagccagtttttatttctgtgatttttcacatttttcattacaggaaacactaacgattaaaattttgatgcgtaaagcaaaagatgtaatccttgcatttaaaacgcgcttaggtgaaattaattctagtgcggaagaaggagattatgattatgtaatccagcaaactattaagcgcttaacgctgttcttacaagagagaaagatggactacgtgacagcaacttttccgcttaattcgcaatcaaatggtcgtgaaatattaaatagtctttggacggagacaattcctaaagttgacgaattgaagcaggtacaattagttaaagcagactctcgatatgcagaggcttattttgtagcgcggactatttatcaacaggtagcactaagcaactatcgctatcatgattttttgattttagctccaaatttaaaggaatacgagacttatttgacgccaattttacgtcaaaatcagattccattttttaatgatttacaacaggaaatgaagtatcatcctctggttgttttaattgaaagcttatttaacttacatgagaatccgtttcaaacacaaaatatgctagccatcctaaagacacacttgttaataccttcttggtataaggaagaggcggagtatattcatgatgttgatgaactagagaattttgttctggctcatggtattaatcataatttatggaaaaaacactttgataattttgtgaatgctgaagtgatccgcttagacaaaatggatgatgaagtagctaagatcgatcgtttgcgcagctacttggttgataagatttcaacatttttcaaaataatagagcaagaaaaagatagtcaaaaggcgttaacgatattttttgagttcttaactaagaacggaattgccgaccgattagaaaaatggcgtgatgaggccaatgaagccggtgatttacagcaggcgcagcaaccagagcaattatgggatttattaatgcagctgttgcaagactatttagcaattaatcctgaaacttttgatttaaatgaattctttaatatgttaattagcgctttccgagaagcaaatttttcccaaattccttcaacacttgatgcggtaaacctttctgaaatggggatggtacaaactagcggctataagcaagtgtttatcattggcgctactgctaataatttaccccaaattcagaaaatgccaggttttttaactactgaaaacttgaatcagctacaaaatagttttaattcagaatcttacttagaagatagtcaacagcttaataacttagaccaaaattatcagtttggtttgtcgctagctttagcacaagatagggtatatgtatcttatccagtacttaatgcttcaaatgaagagcttgatccttcaatttattatcaacgtttaaaggattatggtgctcagcaatttgttcaacatgatttgccagaaaagatgcaggatcttttgtctttcattactaaccctgatgcaagtttaggctatttaacctatatgaattcaataaattcaggtcttgctgtgcaagagttattaaaaatcacacaggagcaactacctcaaaaaacgaagacagtgcttgaagcaagtgattttgataaccagccagaaaatattggtcaggacttggctagtcaattgtatggtcaaaacttgaattcatctgtgtcacaactggaaactttttatgaaaattcatatgaatatttcttgaattatgggcttaagctgcggcgacggtttgaaaatgaatttgatgttattcaggctggaaactattttcacgagacttttgaccgtttagtgaaaaaactaaacaagcagcataccgacttagcagatttaagcagcatagaactggaacaaatgcttaattcggtgcgaaatgtgatgaaggatgaaggaaaatattctcaattaatgaatgatccttttaatcaatatcttttcaagtgtctagaccatactacttctaaggtagctcataattggcggcgctccttgaaggaaaccccgttacgggctaagtattctgaattaagttttgggttaggtgaaaaaatcaaaggattaagcttaaaagtgccagatatatcaggtcaacataaagttgatttgcgcggtaaaatggaccgggttgatttggccaatttcaatgataaggatcaagttttagcccaggttattgattacaagtcatcagctaaaaaatttgatcttgggatgttttataacggaattgctttacagatggtttcttatttggatgttttgactaaaaatgatcaattttttgctggaaaagatcgtctttcattattgggtgctttttatcaaactgttactagacaattagaacgtttgaatagcaataaactaattgatagtagtttaaatttgaaaaagggagcaactgatagtaagcccaagctgatgtatactggcttaatcagcaatgatccagaaatcttagtagaagctgagccattacttgatgatcatcctagctattcttctgaactgtatactggggttaaaactaaggctagaggtggctttagcttgccacgtgaccgcaactttagtgaggaagaaattgaattactgctagaatacgatgagtatcttattcgacaagcatcaagccaaattttatctggaaaaattgaacttaatccatatcgttatggcaaagcgaagaatgccttaacttattctgattatcgtgatgtcttcttttttgatgcgatgctgcgtcaaaatcaatatcatgaaataaacaatctgaataaaaaagaattaattcttaaaatcaaagagaaattaggaaaggaacaataaaattgtctcaatttactaaagagcaacaacaagcaattgatgatcgtggtcatgatattctggtttctgcttctgcgggtagtggtaagacaactgttcttgttgagcgcgttttaagggagattctttcgggaacccaagttgatgaattattagtaattacatttaccaaagcagcagctgaagaaatgaaaactagaattaaacaggcattatcagctgaattagcaaagccgggatctaatcgcagatatttacgtgagcagctaaatcaagtggatactgctaatatttctacaattgatgcattttgtctagaagtaatccatcgcttttattactctgtaaacttagatccaagttttagtattctaactgatgatactcaagctgcattgttaaaagaacgtgcattacgtgaaattgaaggggagtttctagaaaagaaagacgtaaattttaggcatttttatgataactttgcaggggatagagatgcggatagtccgcgcgacttgttgctggatttgtatgattttgccatggccaaacctgagtatcgctcatggttaaaaaaattggttgatgtttacgtggttaatggcagtatcgtggaatctgatttgtggcaaaaacagattaagccatacttgcttactagtattggcgacttacaagggaaaattaatgattatttagaaaatccagtaatagaaacaaaagagctagctaaggctaaggaagcttttaccttgtttgcacaaaatttagatcattttgtttttgctttagaaaatgatgcagactacgataaacaacgaaaactattacgttcgtgtgtttttacagcgaattatcgtaagtcaagtaaatgggatgaagatgttctaaatttttatgaagacctacaaaagttaaaagatgaagcaaaaaatttggtttttgatacttttacttcattttttgctgttgatgaacaagaacaaattaaagtcatgcagcgcggccaaaagattgttgctgcaattgctaaatccgagctagccttgattgatcggtttaataagctgaagcgcagtgaaaatttgcttgactatagtgatatggaacaattggcttatcagattttgagtcaagatacatcgaattctcaaatggctcgtgaattttatcaaaataaattcaaagagattttgattgatgaatatcaggatattaatgctttgcaagaaaatatcatccagcaaatcaaaaataaagataaaaatacgcttttcatggttggtgatgtaaagcagtcgatctatggctttagacaagcagagccaagcttatttttgaaaaaataccatgattttgccaatgatgataataaacaaaccaaaagaattctgttgtcagataatttccgctctactgagccggttaccaaaattgtaaatcaagtatttaaaagtgtgctaagttcagattttggcgggattgactatcaaaaagaaggacaattaatttttggtgctaagtattatcctgaaaacactcctaaagctagtgaagtaattgttcatgaaaagaaaaatagcagtaatgaagatgaaaatgagatagatttttctgaaattcaaatggttttagcacgtattaagcaactaaaagaagagcgtgtacaaatctttgatagtaaaacaggaatgagagagttacgttacagtgatattgctatcttgactagaagtcgtagtgataatttggaaataatgcaggaatttgctaagcaggatataccattatttgtaactgatgcgaagaattattttcaaacttttgaattgactgttatgatgaactacttaaagatcattgataatcccgatcaggatattccattagtttcagttttacgttcgcctttgtttaattttggtgaaaaggatttagctaaaattcgtatcaagagtaagaactctactttctatagtgcattgacttcttatgtaggtgtaggagatgaattaagtactcgaatcaaagattttttaaatcaactagctgatttgcgcaagtttgccacggcacatcgtatttctgaattgatttggagcatttatgctaggacaaatttattagagataatgaccgcactacctaatggtgaacagcgacgagttaatctagaagctttatatgaacgtgctgcttcatatgagagtgcagggttcaagggattataccaatttatcaattttattaatcggatgcggcaaagtcagaaggacttggcacagcctttattaactaaagaagctggtaatgcggtcagattaatgactattcatggttctaagggactagaatttccgatcgtgttttatgtggggatgcagcataaatatcaaatgcgtgatttaaaaggtaactatgtgattagctcagatagtataggaattacgctccgtgaagaacattatcggattgactctttagttaaagcgatgggaaatgtaactaaaaaaaggcaattattagaagaagaagcgcgaattctttatgtagcattaacgcgggctaagcagaaattaattttggttggcgatgttcctaatctggataaacgagttaaagaatggtcgactgaactaaatcagattggtcaattatcattagcagataagttatcttccactagtccattgagttttatgggacctgcgttggctttagatcgacacctagctgtgaaaatgtctgatattactaattcgttggataagagtcagtcgtttttatatattaattatgaaaatgctaacggtgaactacctgattatcagaaagcggagacaagtaatgataaaacgcaaagtaaccttttaaatcaaaccactaaacggctttatcaatttaattatccgtttaaagatgctagtgaaactacagcttaccaagcggtatctgaaataaaaaaagcattcaacgatccgatcgagaccgaattagagaatgcccacttattgacatcgactaatcgttatttacaaccgattgatactaaacctaatttcttgtatcaaactaagtttactggtgcagaaatcggaactgctacacacatgattttgcagtattatgattatcaaggcaatggtgctgaagatcaactagaagtagaaattcaagaattgattaagcaaaagaaactgaatccagaaattgtttctagtttaaagaaagaccaaattgagtggtttgttcatagcaattttgccgaggaattttggcaaaagccagagaatttaaagcgagaaatagatttttctagtttaatctccgctaaaactttgtttaaaaacttttcagatcctaatgccaaaattttggttcatggtacaattgatggctattttgtcaaaaatgatggtattattttgtttgactacaaaactgaccacgttgatcaatcgcatttatctgaatcaattgaattgattaaagaaaaatatacaggtcagcttagactatatgaacaagctatcaatgaatttagtcaaaaaaaagttattggaaaatatttaattctgcttgatgctaaacaagcggttgaagtgaaatagaggaaggaggaaattatggcaaaaagttttactaaagatacatttgctgtagttgatctagagactacaggaacgcaacgtgagaatgggcatcatattattcagtttgggtgtgctattattaaaaatctcaaggtagttaaaacttattcatttttgatcaatccgcatcgtgaaataccacaatcagttgttaatttaaccggaattcatgatcaagatgtagcaaaacaaagagattttgattattatgcacccaaaattactaaaattttgcaaaatactgttttcgtagctcataatgttgactttgatttgccttttttgaattatgaactagtgcaacatggttatgaggcacttacaaataaagcaattgatactgtagaactggctaagattgcttttccgacttttccatcttataagttgagtgatttgacaacacaattggggattaaacatttagatccacataaggcagattctgatgcttatgggactgcagttttattgcttgaaatttttaataaattagaaagtctacctcaagctacactgaataccctcagttcattatctcatgggcttattcgggatacctcttgggtgattacaacgattgcagataatttacgtcaagaaaaacggcctttaggtaaagaatatatgcaagtgcgtaatattattctgcaaaaacaaaatgataattctgaagcacatggtgggaatgctaaattcccaaagactgactcagagaaacaaaagctatttaaagatcatttacactttcgtagagctcaagtcgacctaattaatcatttgcatcagtttattaatgatccagataaaagggcgatgctaattgaagcacctaacgggactgggaaaactttttcttatctttttgcttatgcttatcagctttattctggtagaaaattagttgtagctacaccaactaaagtgttgcaagaacaagtgattgaacatgaaattccgcagttatttaaggtgattaagttggatttgactgcagaagtagttaagtcaagtagtcgttaccttgaccttgacggatttgtacagacgatttttcaaggtacaccgaataagcaaaccttgatattacagatgcagatactggtttggctgactaagactaaaactggtgatttagatgaattaaatttaactaactataatgcaccactctttgcacagattcaacatccaggggatgcaagagtaggtagccgttttgcaggggtcgatttttggaatttagcgcgtaaacgacaagaagaagcggatatattggtgactaatcatgcttatttggctaaccactatatggatacaatttggggtcagaatccgtatttagtcattgatgaagctcatcgtttcacagacaatgtcgtaagttcgcgtaatgattctttgcgttttgaagctttgtggggagttttaagtcatctccgtaatttgctttatttctcagatgaaagtgttgaagcgcaatttaatgatgatgtgcagctgaaccttttactaaagaaaatagatcctaaaattttggaattaattcagttaattaatgaattacaaaagcaactttattttcaaagagataatgctgttaatcggacagttttagctaatggtaatctagaacttagttttcaaggaaaaagtttatttggcggaaatagcaagtttaaagcgattttacctaagttccaacaaaaattagaagaggttagggacttaactaatcaggttttatttgaattatataatgaacaagaacgcatgctggctaatgttgaggtattagtcaatgagattacggaacaaattgatcgcctagattattactctgaaaagggctatcaattggctgatttgctttctgatcaaaaaggtttagagcaagatggctttattttgatgattactaatcttgatgatccactaagtaccaatttagactggttaatgcttgatgctggtgaagtattaaaacaaatctatagtcgttttgaccatattgccttcgtcagtgctactttaaccagtaatcgaaattttgaatatgcaatcaaccagttagctttaacagaattacatccggttgaatatattggtaaaagtacttttaatataaaaaagcatttacaggtactggcagttaataatatgcctagccctgatagtgaagaatttgaaaagactattgcacaaattttacttagtgacattcaagataagcaccatgtacttgttttgatgactaatttagaaaaaattaaaactgtttttaccatgattatgaatgagccacagctaaaagattttgaaatcttagcccagggattgtctggttccaataaccgaattgctaagaggtttgtaattgctaaaaagtcaattataattggtgctgatagtttttgggagggaattgattttcatgattgtgggattgatactgtttttgcggcaaaaatcccgtttgaatctcctgatcaacctgaagttcgtttaaggcagaagaaattggaagatcagggaatcgattcttttactaaagatagtttaccaagagctgtcattcgttttagacaaggaatgggccgtttaattagaggagaacaggatcatggtcaatttgtaattttagacccaagattatggactaaagattatggtcaagagttccttcaaacgattcctgtcaaagttgaaaaggttactagagaagaattaaaaaagaaattagaaaataaataattatgttacaagatgatacaagacaaacaatcaagtttgtgagttgggtaattggtttgataatagttgcctttctagccagcattgctatcttttattatgctggatctagaagtcggggcaatgatcaaaaagttacgcaattggctactagtaaaacaccaattagaaagattcaaaactattatcatttagatcgcggcactagcagctatgctatagcaggcaccaataataagggaaaacaatattactttatttatttgccaaattctaaaaaggcatatctatatcctgcggccaaaggaatcactgaatctaagattaaaaataagtttaaatctatccatacggatgctacaataaataatattaatcttggttggtataagggtgaggtcgtttgggaagtggcctacaaaaaacaaaacggcaatctaggttatactttatatgaattcaaaaatggaaatgatatctcagaagtcgataatttatagaaactttggtattatggaaactgtataattgatgaaaaggtggataggattttatgacagaattgatttcaattaaagattcttctaaacatgttgatgaagaagtcaagatgcatgtttggttaacagataaacgatcaagcggaaagattatctttttgcaattacgtgatggtactgcatttttccaaggggtagtacgtaagaatgatgtatcagaagaagtatttgatgctgctaagtcacttagacaagaagcaagtttttacattactggtactgttcatgaagacgcacgttcacactttggttatgaaattcaaatcactgatttaaaagtggtttcaaacaatgaaggttacccaattggtaataaggaacatggtgttgacttcttacttgatcaccgccacttatggttaagatcaaagaaaccatttgctattatgcaaattagaaataccatgtttaaggctactgtagatttctttgaaaaagaaggctttatcaaatttgatgcacctatctttatgcattcagctccagaaggtactactcaattattccatgtagaatactttgaccacgatgcatatctttcacaatcaggtcaattgtatggtgaagccggtgctatggcttatggtaagatctttacttttggtccaacttttagagcagaagaatcaaagggtcgtcgtcacatgactgaattctggatgatggaaccagaaatggcttggatgcatcaagatgaatcgttagatattcaagaaagatatcttgcctacatggtgaagcaagttctagaaaataatgaatatgaacttaagattcttggtagagatcctgaaaaacttcgcccaactactgaaggtaacttcgttcgtcttccatacgatgatgcaattaaaatgcttcaagatgctggacgtgatattaagtggggcgatgactttggtgctccagatgaaggctatatttcagaacaatatgatcgtccagtcttcattgtcaactatccaacctcaattaagccattctatatgaagaagaatcctgataatcctaaggaatacttatgtgctgatgtaattgcaccagaaggttatggtgaaatttttggtggctcagaacgtgaaggaaattacgaaatccttaagcaacaaattcttgacgctggtttgaatttagaagactaccaatggtaccttgacttacgtaaatttggtggagttcctcactcaggtttcggtatgggctttgaacgtactattgcttgggtttgtcaccttgaccacattcgtgaagcaattccattcccaagattgattaacagaatgcaaccttaatttggttaataattaaatattgatacacaaagttggactagttattagttcaacttttgtttttgaaaggaaattattttggaatttaatgattatcgggcattaggctttacaaccttacaaaatggattgatcgcttactaccctcaattaggcattagtgatgctgaactaattttgataatccaattggaagcatttagccaacgaggtgagagttttccatctaatgaaaagattgctgctaatactaatttatcggttagtgatgtgggtaatcttattcagcggctaattgaacgaaattatttaactattgaacaaatgactgatagtcaggataaaattggtaataaatatagtctcaataagttgtataatgcacttgatcactatattgatcaaaacgtcttgatcaaagataagaaaaaagataaaactgtttcagttgctaataatttagaaaataatccgttaaattatttgtcacgaaaagtagaagttgaatttggtcgctatctgagtccaattgaacgagaagagattgcgcaatggttaagtgtggatcactatgctcctgaattaattgaacttgctttgcgagaggctgtattgtctcaggcatattctttaaagtatattgatcgtgttttacttaattggcaaaggcatagtctgaaaacaactgatgaagttgagagatttttgaaaaggaatcgataaaaatgacagaagatttattgagtgatgaagaagcacgtagagttttgaaaaaaattttagcattgtatcctgacgcacaaggtgaattgcaatgggatactaactttcatttactttgtgcggttatgttgagcgcacaaacgactgataagatggttaatcgtgttatgcctagttttagtaaaatgttcccaaccccagaagtattagcaaaagctccaattgaagagattgagcatgagataaaaactattggtctatttcgttcaaaagctaaacatttaaaggccactgcgcaaattttggtcgataaatataatggacaggttcctaaggataaaaagttattgatgaccttaccaggggtgggagagaaaactgctaacgttgttttggctgaaggctatggtgtgccagctattgctgttgatactcatgtgtcacggatttctaaaaagttccatattgtagatgacaaagctactccacatgaagtagagaagcgattagaagcaattttacctaaaagtgaatggataaaaacgcaccatgcgatgattctatttggtcgttatacaatgccagctcgagctaaaggcgatccgtattcttatttaaattccgaaaagtaaagccgaaataaattcggctttttttattgaataattttatataatctgttgttactaaattttgattttataatttcaggcctcaactacgtttcggccaaaataaaaacagataacaaaacgctatctgttaataaatatatttaattattgcctagtcattatccgaatcatcattacgttcatgtgattcttcctcaggttttctcgttgatgaactttgttgtgttgaagaagattgtgttcttctttgagaggaagaggctcgctgactgctattggattgagatgatgagccattttcacgacttgatgatgattgagtaactgcagttctagaagatgaaggagtagttccagtattatcgcttgaagtatcagtttcttcatcgtcttcatcataacttgctgcactattaccaattccggctggggtatggcctcgaacaaataattgccaagtgccgccaccagttgctaattctggaggattagagttatttacaattttcgctcttacaactgagctaggctgtttccagtctaggttaggcttattgttcattaggtaggtcatcatactcttatacattagctgtgcagattgttgacctattccagaaatagtaccgtcctttaaattatcgtaaccagtccaaacacccataacatatgatctggtataaccaacgaaccatgaatcttttggagttgaattatagcttgggtacttagctagatcttcatcagagtatttaacagtaccggttttaccagcttgataaagatctgcaatttttgcattagtaccagagcctcgtttgattacgcctttaagcatatcggtaatcatgtaggcagttgatttcttcattacacgtacaccatttgaatcataatttctggttaatccatctggtgtttcaatcttagaaacaaattgcggcttgtggtatacgcccatggtggcaaaagcactataagcaccagtcatttgtaaactagacgcattagcgccaattgctactgataaaccagattttggtgaaacattaacgcccattcggcgagcaaaagctgaagcccgttttactccaacttcagcaagagttttaatagctggaacattacgtgactgctccaatgcatgtcgcatagtcatcatcccgtcgtatttgttgtcccagtcatataattggatattggtaccaggataaacatacttactgtcatcaatcatttttgctgttgaccaattcaagtattgaatagcaggtgcatagtcaagtactggcttaattgacgaaccggtagagcgtccagtttgaacagcccggtctaatcctaattgaacagaaggtaagtgacgtccacctaagattgcaacaacatgaccattgtttggatcaactacagttgcaccaatttgcattttattgtttgtaaaaggtacagaaccgttgttagctaactcgtacagcttgttttgagctttttgatcgatattaatagtaatctttaaattatcgtgatatggatcaaagcctttgctcttaacttcagaaattacctctttaatgtatggatcatcaatttttctaatcttagactcgttattatttcgatgtgatttaagtcccttactaattggttcagcaactgcttgattgtactcagctttagtaattttgtcattttgtagcatagtctttaaaacaatatcacgccggtatttggccttttgcggataaagatatggatcatatgcaacaggtgcattcggcatccctgcaatcaatgcagtttgtgccaaatctaacttacttagtggcttaccatagtagtagttagaagcagtacccatgccataatttccatagttcataaagactttattaatataaaattctaagatttggtctttactgaattcatgttggactttcatagctaaccaagcttcttgagcttttctcttcagagtacgttgagaagcagcagtagagaagaccgttagcttaactaactgctgggttatagtagaaccacctgcagcaatactattacttttggcattagttaacatagaaccaataattctaattgggtcaacgcctaacttatctttgtaaaaacgtttgtcttctactgaaactacagcatcttttaattgctgaggaatgtctttatttttaacataaattcttttttcagaaccaagtgatagtaaaaacttaccattattagtatatagacttgaagatttaccactctgcaattggtcctgactaatgttaggagcatctttggcataaaaagcaaaaagcccgattccagagattactattaaaaatatcagcaaaaagatccatttaatgattctaatccataagtggccactacttggccttcgaccatgatagtctcttcgtgattctcgtttcatattattgttattatctgccatgattatcttttcctatctgcaatgaatttatctaccgccttaagataaggcagtgtaggacgaaagccacttttgatttcaaaagaattgttttcaatttcttttaaagtcattgagcttttatctttttttcgccaagctcgaattacaaaactagctggagtaacaaagtagcgctctaagctagcgaacctaataattgtaaaacaaattccttgttgttttaagcattcgtccaagtgaaaaatttggtgttcatgaaagttttttaatgggaagttagttttattccgtgtttcttttgcctcaaaatcgagatagtatcctttataaacaccattatagtcagttgttgaagcttgcctaaagtaagcttcacgaatgaccgccttagaacgtttgggataatcaactttaacaatttgaattggggttggctttttatgaacaactgcaatttcttccattaaataatatttattagattcattgatttgttgctcaagtgtcatcccacgatcagaaaagttaacaccttttttatgatgatatgatcggtgaactggatgttcatcttttttagttacaggttttctaaatgcggctaaactaccgctaggatatttgaccattgtcctcactcctgttagcattatagcaataaagactacatttttgaacataaaggggggcttaaacaaatgcagcgtttatgggtgactggctatcgcagctatgaattaaatgtttttggcgatcgtgatcccaagataactgtcattaaatatgccctaaaaaattatctgacaagtctactggatgatgggcaattggactggattattactggagctaacctcggtgtcgaacagtggacagctgaggttggacttgaattaggagaaaaatatccggtaagaacatcaataatgattccatatgaagaatttgctaatcgatggaatgatagtaacaaagctaaattcttaaatttgaaggaaaaagtggacttttttgcttcaacttctaataccccttatcaaagtccacttcaattacgtaattatcaaaattttatgattcagcatactgatcgagcattgatgatctatgattcagagcacccaggtaaacctaaatatgattataatttaatccaaaaataccaggaaactaaagaatatccattagatttaattgatttttatgatttacaagatgcagctgaagaataccaagaaaatcatcaaataaatcatttttctgaataatatggtaaaaattttattaaagtctgtttctttattttcagtcagcgttgtttttgctaaaatagggtggaatgtaaaggagttgtcagtaagatggcaaatttaaatgatataaaattatcaggacaagatatattaaagaaacaattcaaaagtaaagtaaagggatatgatcccgatgaagttgatgcatacttagatgaagtaatttctgattatactacttttcaacaaattatcgaagatttgtatggtcagatcggtacgctccaacgtcaattaatggatgaaaagcaaaaagcaaagaaaacagttgaggctgaagaagaaaaggttaagacttatatgccaacgcatagaagaagtgcgcctgtgaagtttgcagaagatgcagatgatactcaaggtgaaatttcgactaatatggctattattcaacggatttcaactttggaaagaaaagtttataatctagaacaacacgtttatggattaaagcattaatttttgctataatgactaacagtgtgaattttgagtaggcgcggctagcttatgttagctgaggaaagtccacgcacacacagactgcgatgtttgtagtgatcgtattcagcctaacaagctggaggaggacgttagtcttcacggcggaaaaagtgctaaatcttcggacatgcattactatcctgaaaagtgccacagtgacgaagcaaggtcagaaatgactttggtggaacgaggtaaaccctgcgagtgtgaaacccaaatttggtgggggagtttcggcctaaggaaatgaactaaaggtcggattattgctttaagcagtaaagatagatgactactgaaggtaatctttgccagagattattggaacaaaacgtggcttatagaaattcacacaggcagagttgggcttttaggtccagctcttttttattttgaaaatgaaagagtaacaatgaaagaataccaactttacgcaactatgggcgctggttttgaaagtgtcgttaataaagaattacagtctatggggtataagacccgtgttgaaaatggtcgtgtcttttttaagggtggtcaagaagatatagttagaactaatctttggctgagaacagctgaccgaattaaaattttgctaaaagagtttagagcaacagattttgataccttatttaatgagatttatgattttgattgggccgaattattgcctgttgacgctaagtttcctgttcaaggtagagctgtaaaatccaaattgcactctgaaccagatgtacagtcaattgtaaaaaaggcaattgttaataagatggttgaccagtaccatcgtcgtggctttttgccagaaactggtaatgaatatcccttagatattcatatttataaaaatgtagctcgaatttcgctagatactacaggcgctagtttgtttaaacgtggctatcgagtagagcatggtggagcccctatgaaagaaaactttgcggccgggctattaaaactaactccatataatggtactcaccccttaattgatcctatgactggttcaggaactttagctattgaggcagcattaattgctaaaaatatagcaccaggaacctggcgtaaattttcctttgatggttttgactggtttaaccctaaactacataatgaagtattggcaaaggctaagagtgaagttaagccgcttgaagcaccgatttgggctagtgatattgatcagtctgttcttgaagtagctaaattaaatgctcacaatgcaggtgtattgcaagatattcgctttaaacaaatcgcagttaaagactttactactgatctagaaaatggaattataattgcgaacccaccttatggtaagcgattgaaggatcgtgagtcggcagaagagctgtatcgccaaatgggagaagtacttagaccgcttagttcgttcagtcagtattacttaactgcagatcctaactttgaaaaatgttttggtgcaaaggctactaagaagcgcaaactatttaacggaaatttgcgggttgatttctatcagtattgggctaacagaaggtaagaaatgattacaaaagagcttaacacagaattttgggtgatctcagatacgcacctaatcgcagatagtttacatgatgaaggacaagccttttcacgcatgcaaaaaactagtcaaggtaaggatttgtattatcaagaaatagccctttctgcttttatgcgaatggcacaaagaaaaaagcctgccgcaattattgtaactggtgatgtgacatttaacggtgaacgagtttctgctgagaaatttgctcaaatttttaagccgttgaaagaaactaaagtgttagttttacctggaaatcacgacatttttgatgggtgggctagagaatttcgtggtaaaaaacagttctatgctggtgaaattagcccaatgttttggcgctcgatctttgataaatcatatcgtgaggccttagatgaagacgataattcattggcttacagtgtccaactgaatccgcaatatcttttagttttagcggattcaaatatttatggaaaagaagagacaacagaagcaccgcacactcacggcgaaattggaaaagtacaattaaaatggattgaaaaacaatttcgttatgcgcaggaacatcagttacgtccggttttatttatgcatcataatttatatgcacataatccagcagttaacaagggctatgtagttgatgacgctgttgagctacgacgtttgtgtgcgcgttacaacgtgaaattagctttttctggtcatattcatgctcaaaatattatgggaccacaagacatgacgcctacaactgagatcgttacatcaagtttttgttctaatgatcaaggctatggagtagtgcgagttcattcacggcacattacatatgtgcggcgtaattttgatatgacaagatatttaacggatgaggaaaaggaaaattatactttagttcattatcataagtatttaaaagatctacagcttggtagtatttctgcggatatgatgcaaagtgaattaaatcagtatcacgaagacatcgagttagttagggcgatggggaatttgtttggctggatgaactatcatttctttaatggtcataatcatataaaggctagcgagttgaataaaatccatgcttctaaagaatatcaagttttgattaagcaccatcctgagtatcggttatatctaaagacgctgtacgacacaagtgatcactctaatttacaagtgaagatacgatactaaacaaattttagtataatggatactgattctaaagaaagcggacatgattatgttaaaagatgaaacaaaatttgatcaattagggcaaaagctttttatgaaaggtgttttgcaagacttcgaaaagaaaaatggtccaattaagggcagaatgatggttacagaaggaaagattccgccggaaatgttaactaagctgcaatctgaattgatgaatagtagtaattggattgtagttgaaggtagttttgatttttataattatactgtcggcatgattgtagatttgactacaggtaagccattagcaaatggatggttggtaccacaattgggtcacccagggatgcaacctgcagagaaatggcaagaatttttgattgaaaaagtcgttgatgcaatcgatgaaaaaggtaagattaatttgccgctatatgtttggatttcagatcgtagtgatttgaccaagacggatcaagatttataaaaatatttttaattatgtaaagcttaaacaaaaaggtaggtcaattttgacctaccttttttaggatttatttattagtattaagaagttattgaattaagtaagtagatattatttaaccagtttaattttcaaagtgagctagttattaattgcctgagcagatttttgagcatcccaccaatcgggtaaatcacacaataacttatttaatgtattattgcggtgcgaaattgagtttctctcattgagattcatttctgcaaaggtttttcctagttctggaactacgaataaagcatcgtaaccatagttactgctaccatgtggatacttagcaattaatccactgattctaccagcactaacaatatcattgctttcttgacctggccaagtaaagacaaaggtagtgtagtagctagctgtccttttttcactagaaactccacctaaatagcctaataatttagctttatcatcttgaccattatggtggtaaggcaagattcctaaagagttaagtagataatcaacacttagacctgagctttctgataatgtaggcaaattggtaaattcagctaaacgatgtgctgtagctctagcattacttaaaaatgttgcctcagaatatgacttttgtggtgcataatctacttcagctaaaccaactactttgataggaagactaagctggttaagtttatcttgtaattcattaattttattttggtcatatgttgtaaataataaactatccattattttccccatgctttcaaaaatagatataccatttatattgtatccgctttcatatactgcacagtcattgtcttatctttgtgaagtaaagtcaagcatagataatagcttttatcaaaaagtccatatacttcaggtttttaaactgaataatgttatttttaatgactaagattgtgaaaattatagaaactgtcaaatcttttgtgtaaatagatctttctcgtaaattgattttttaattatttatttaatcaaagtaggattctaaggtgtcctgaacctgaccaaagcctttatgaattcgattgaaataacggtcattgtagctcattgcctgaatgccaataaaagcatcaagcgactgttcagttggaaactctgccttaggcttagctttgcgcttgatcacattgttaaatgattcaatcatgttagtcgaataaattgaagctctgatctgcttgggatagttataaaagaccagcagatctggttctatgtctttcaagcttctgataacatggctgtaaaccttgccccatttggtatagaagtcatgcaggacagctgtggcttcttctttgtttgtctgttgatgcacctgtttgaattcgttcatgatcttttcacgatcgtcgacgcgtactttagcgcagatattgcgcatgacatgaaccaaacagcgttgaaaatgagctttaggataagtcctggccaaggctgttttcatgccaacaacaccatcagaaagaaaaagctcaacttgctttaagcctcgggatttcatgttttgaagcatatctgtccagacttcaatgttctcgctaggcgcaatgcagtagtcaatgacctccttgtgcccattaggcttgatgccaatggcaatatagactgcttcacgctcaaatgtttctcggcgcaaaggaaggtatgtcgcatccaaatagacgcagaaaaacttgtcgcttagcttgcgtttgtggtaagcctcaacctttggaatcatctgcttggaaatatttgatacctgagctggactgtaatggctgccatacatcttttcaattagatcggctatttccctggtggtcacgcccttggagtaaagcttgataatcatgctttccaagatatccgagtgctgcttgtagccaggcagcgtgtgctgatgaaattgaccgttgcgatcccgaggcacttgcacttcaattgggccaaattgcgtatcaactttgcggaaataagcaccatttctagagttgccagtattccagccatttctggcatagggatcatagcccagaaaggcagtcaattcagcttctaacaagttattaacagcctgttgtagctctttgcgcaataaatcatttattttgtctggattgaatagagcttgagcaaaatctttggtaaaatcattcatgaaggagttcttctttctgtatgtgtttttttgttcaaaccaatcatacgagaaaggaactcctttttctaatgtttaaagaaataaatttaaggaatcattcatccttacacaaactattttacagtctcgattaatcaattaataaaaaaataaaattgtattttaataaaaaagagaaaatcttttttagattttctcaattatgattaactagctattaaaaatttccataatgcattattggtgtaccagttttgcggttgaattgctcctagacaggctacaataatataaattgctaatgttgagattatgaatgcaatgcctaagttgacaatgttgaatggaaaggtagttttatgttgtttcattgcgatgtgaatggcgaaagccaacagaaccaaacctataataattccaaattgataataaatgctcattttctctcctaagttacagttaaaagtatacgttaaaatcggattaaagagtgatttttatttatctagcctctttattttatcaaaatcaatgttatattagagaggtagaaagaagattatgtacatatgtctgtagatatttacaatgaaaaacttgaaccatacgacgatggtaagcgtcataaatttagtggtacttttgatagattaaacgatcgcttagctatttttaaggatttgcgtattgcaggtgctggtggcaatccaattgttaagcagttagcactgcattacttgaaaactttcaaagaccttgatttgaagaggggcgatgtagttgaatttgaaggcatggttgaaaaagattctaacaatggcttcacaattgaacgcccaactcaagcagaaaaaatcagatcagcagctgccgatgatgctaaagttgacgtggttggcgatgattggaattggtttgaaaattagttaacggaagtgacttacgagatgtaagccgcttttatttttgaaatttaagtcatagctagaaatgtagtaaaattaagcttgtaaggagaattagatgcactttgatatctttaatcgaaaaactgtctcaactgataaaatgtttttccagacaacattaaatcctaagcaagcaataatcattggcaatggtgctaaatttcgacgttgggttttcttttctactaattttgctacattttatgtaatcattctgtcagctattagtattttattaattaagtctaatgtttctgtactaatttgcttactattagcattagcaaatttagtaattaatcgctcaatacctcgttattggcaaactttctttggcccgaatgctgaatatggaaaaaatcatcgtccagctattttgcctattttatatatcataaccttgttcggttggctttggagcgtatcacatttcgtaggatctttaacttttattactggtacatttgtgctagtaggtcttgcaggtagtttgttatcgctctggatatggatgaatttgaatactgttagttgtgctccaatcagtgaattacaatggcgaaacaatgccaaacgcaggggaatgtctgatgaagacattgataaggttattgctagtttaaaaaagcgtagagcaatatattttagtaaacacgataaataaaattatagacgaaagatagaatttaatgacagattttacagaatttgaaagtacaattttttcatcagacgataattttgccattcgaaaaattaaacataatgtcattttgacgtattgcactcaagatggtgaaaaagaatatgaaagcctaagtaagaatacatatcgtgtattttttgaaaataatcttgaagttagtcgactgtatccacctgatgaattcagtcacaattggctaatccaaattttaatgccgcaactttcaattgattcgctcaaatctatggcgattgccttaactacattagaaagaattgcgcaaagtcaagaaggcatgcaattatctgaatatgttaaaaatagtgagttagtagaaataaagtcctggtttgatctgcgtaataagttgcgaaaaatatccaaagcttatagcctaattaagcaaagtactgatcaaacaacacagtggctaggaagtgatggacatcgttatcgtgaagtgattttagccaatagtttacggcttaattatggtcaagatgaagttgttcgtttaattccaattaaaaataattgggttattcagtttgttaaaactgatttcagtgcaactgatggcgtaattgatcagctttttgcggcattaacattattgactcaatatgtaaaacaaatttaaatcagagatgaaacatattctttatgcccttaatgggacttttttaatgttactcgttccggctttatttgtattagcattacgacaattaagccatgaagctaaccaaaaattggtaaatacatttggttttaatagtcaaattattgttggcggattaggaattattgttcatgaacttagtcatttgattatggctataatttttggtcatcatattaatgcggttagtttattgcgcatccctagtaataccaatgatatgtcacttggctatgttaaacatacttggtctcctacatctacttatcaaaaggtgggtaatgcttttattggcattgcacctgtattaggatgcaccttgctgatttacataatcatgcgtacattgaatacacctatttcattggttcagaatcagcttactactcagttattaagtaatggtaatgcacttaactggaatttcttaactcatagttggatttatatttttgaattatttcagcttaattttgattcaatatggcactcaattgttgctttattgctagtaatcagtctatgttttggtggattcgatttaagcgaggctgatataagtagtggcaaatatgcttttttaggattaattggtataacctttattatgcttctcttagtttcttttctaggctttcacgctgcattattaccgtttttagttaatattactgtctggatttatttggtattcattatatcaatagtgattttagcaataattaatttaattatgtatattttaaatattattttataaaggagaaaataatggcaaaagcgttattagttatcgactatagtaaagactttgtagctgatgatggagctcttacttgtggccagcctgctcaagcaattgatcaacgtattacagaactgtgtaaacagtttctacaaaataaagattgggtgattttcccgatggacgcgcacttaaaaaatgatccatatcaccctgaaactaaattatatccaccgcataatattattggaactgctggccgtgaagtatatggtcaaacgggtaaatggtatttagaaaacaaagataatgatcatgttttattaatggataaaaatcgttattcagcttttcaaaatactaatctagataattatttacgtgaacgccatattcatgacctgacactaactggtgtttgtactgatatttgtgtattgcacacagcgattgcggcatataatttagactatgaaattacaattccacgttctgctgttgctacttttacatcaaatggcgatgaatgggcaatggctcactttaaaaatgcattaggtgcgaatattgctgattaatttaatggcctgcataatttactagtaagtccaattattactatctaataaaaatatacattataattaatgtaaaggaaaaagctatgtaaagtgaagaggtcaaaatgtatacaaatattcgtaaatttaaaaagggcggaaactacccggaacagcaaaatgggctaccacaagcattttttcataatcccaagtataagaagttaagccccgatgcatgatacctatacatgatacttacgatgagaatgattgattcacaaaccaatggatgggtagatgctgacggtaatatgtatattatttattctaatcaagagctaatggatgacatgcattgcaattcttatacggtgaaacgactaaagaaagaattggttaatcatgatttgttactcgaagaagatgctcctgcagaacatgatgataggttatatcctttaagaattaatgaaaacgaaaaatgataaaagacattggtaaatacggccaatgtcttttatttagtattagtaaagaaaataactaatgtatccgcatcaggataaggctctgaatgaacacttaagaaattttgcagtttatgattgtattcaatattattttcactttgactattttgataaatttgctctagccagctcggttagccggataaatagcattgttcatggcggaacctacagcgttactttgaacgtcatttagtaaatatgatgtcccaatttgattaatttgattgagtaaatgatctatgcgttctatttcctgcttcttatcatgtacgtttggcacaagcagtagagagacggctgtaatatccatttcacattgtgcccaaaatttatcataaagcttgctaaagttttgatctgattgagctaaaagccattcctggtagatttttaaaatacgaattgttttttgaatatcatataaataaagcttacgataactaaactgctgaaattttcttgtaattccagaaagtagttctgtatagcaatctaagtcttcagcaattttaattgccgagtcatttttatttcctttctgtattttatttacattagctgatacttatataagtctatatgataatactgtactttctatacttttattataagatcatcgcatgatttgttaataataaaatgctcactaaaaatgttgtgacaatttattattaacaactaaaaaattatgatagtgtaagtagtaataattatgaaagagcgtgatgtaaatgtctagatggcatagattatttcctgaacgagtttttgatcgtggagaaatatattatggcaatgatatggttgaaaatattcaattagctcaagatcaggaacactttaccgctcaagttcaaggcggaatgggtcgttcttatactgtaactggtcgtcttcgtttagatggtcgagcttcagagttagactgtaattgtccatgggctaataaagggcatcgctgtaaacacgaggttgcggctttacttgcagtagaaaacgaacaagaaaatgaacataacgttaaagtcccttttgctgacttaatttctgaacatcttaagcaaatgattgcacataaaagcccagtacttaaccccttaaatttgattggcaatatgaaatttaccaaaaaaagttatgatcaggcactggaacttaatgatcactggtcgattagtagttgtcggcattttgatgataagatgcgtaaatatgaatatttttgggagatagtaacagaggacaatgagttaattacattatctgtgcaatttactcgctggcaaattatatcaattaaatttgatagtgatttttcccgtattgaaaaagatagtgttagaatattagctctgttttactttattaatgagtatcttgatgacgatccatttgatttaactaaccaggccgctgaagatctacttgaattttatagtgacgcttctacccaaaatgatgagccgattattttgcgggcaagtattgataagtataataacatccctagtttgacgtttaaattaggaaagaacaagcatctttataaagttaaagatcttaatcaactagtagatgcatcccgacacagctcttctctaaagctaggtaagtttttcaacgagcctataaatcaggctaaaatggatattgatagtcaacactggttatcttttattgaaaaaattatagatgctcgtaatctaaacgaagaattttattataattacagtagtcaggttggtcgcattacactagagaactctgtggccgatgaagttaatgatttactttatcaaggcgtaaagttgtactcaaatgagcagcctataggatatacaactgatcaactagatttaaacattaaaattgaaactcaaaagtcatctgctttagttagtgtagaggatcttccagtttctactataattactgggagtcatgcgtattatggctattacaaagatgtatggatcaaatatataggtcttacgcctgcttctttgcataatttaggattgcagcctggtgctgaaatgcaatttagtaaaaagaccgttgctaagtttgcacataatattttgcctaaatttgagcaaacaaagtttatattagtgtctggtactgatgaattgaaagctattttgccaccagaggcccattttttgtttaaattagattatcgtgtaggcagtattttatgtgtggctcgagtacagtatggggatgcacaatacgagttaaatcaaggatatactgaagaggaccgacgcgatgttgaaaaagagaccgcagcatggaagcacattaatacatattttagtgattatcagcatgggcggtatgttttatccaatgaagactcggatgtcgtacaagcttttctagatgatggtatcaatgagttgaaacgattaggcgaagtacaaattacagctaactttagatcacttttaaagggaataaagattaatttggatgttggagtaggtatcaacctgactaatgaattattagatatcgatcttgctgatcaaaagatgagctgggaagacattcaagcggctttgaaagcctaccaagaaaagcgaaaatattttgttttaaaaaatggaatgctagctaaggcagaacaaccgacaattgaacaattggcacaaactttgcatgatttaggtattagttttaaggatttcattcacggtaaattacatttaccagcatatcgtgccttttattttgctaagcaaatgaaagctgctaatgcactgcatttctcaactaatgaatcctttaatactctgattaatgatttagctaagaatcagttgaagcaaaatcaaataccagttagtttgcaaaatattttgcgtccatatcagaagataggttttaattggctaagcactatcgttaattataaatttggcgggctacttgctgatgagatgggattaggtaaaaccttgcagattattagtcttcttttagctcgcaaagaaaaaatgcaaaatcagttacctagcttaatcgttgcgcctgcttctgttatctataattggcaggcagaagttaaaaagttcgcacctagccttaatgtggctctattagatggcactaaaaaagaacgagagagattgcttttagatgctaaaaagtataatctgctaatcagttcatatcaatcgcttaatcgagatctagaagcgtaccaaaatctaatttttgatgtagaagtaattgatgaagcacaaaatattaagaatcagcaatcagttaccgccaagacagtcaaagtcattaaagcgcatcataaactggctctaacaggaacaccgattgaaaataaattgagcgagttatggagtatttttgattacttaatgccaggttttttaggtttatatcctgactttaggaaaaagtatgaattaccgattgttaaagagcaagataaagaagcagaagatcaattagctaatatgataataccctttatcttgcggcgtctaaaaaaagatgtgctacgtgacttacctgacaaagatgaagaaattgtgcctgttaaaatgaataagaaacaagctgatttgtataatatgcagacgcaaaagattatcgctcaattaaatggacagggggatgaagactttaagagatcacgttttcaaattttggctcagattactaaattacgtgaaatttgttgtgatcctcatttgctttatgaaaactatcacggcaagtctaataaattaattgctacaattgagttgattaagaataatctagcaaatggacataaaattttattgttttcacagttcacagctatgctagatattttgcatgaaaaccttgccagattaagactacctttatttactattactggatcaacacctaaaactaagcgtcaagaacaagttcaaaagtttaatcaaatggctcaaccaggggtctttttgatttcattaaaagcaggcggaacaggcattaacttgactggtgctgatgttgtaattcattatgatccttggtggaacttggctgcagaaaaacaggcgacggatcgagctcatagaattggtcaaaagcattctgttaagatttataagatggttacagaagacagtattgaagagagaatcattgctttacagcaaaagaaagcagaattagctgatataattttgcaaaatgatcagattgctgatgcaacaatgagtaaagacgatttaattaagattttgaaataaatagatcattataataaaataaaaatatttgtttgtacttgcgaactattgtttgcaaaagtataatatttaggtaaacaaaaaccaacaagctaaatgcttgctggttttataattttagtttgagttagtatgtttctttttataccaatacactagaccgaatggaaccagattctcttggtgatgttcgattcgaataatattgcttcggtgactccagtaaattaagattacgagcaatccactgataatgctcaaggcaagatcgtggaaaaagaatgaagcaataaagattagaactactgagatcaaactagttaatgaaaccatacttgtaataaataagatagggaagaagattaacgcacagatcaagaaaaaatggacattatatcctagtaaaaatccagcggaagttgctactgccttgcctcctttgaactttaaaaagacaggaaaagcgtggcctaaaattgcagctaagccaaaaatcaagcaaagataatgtggtcctagtttaaaaattattggtaatactgtagcaaaagttcctttgagaaaatctactataaagacaatgattccagcagctggtcctaatactctaaaggtattagtcgttccgatatttccagatccgtatttcctaatatctttatgaaaaaagatattacccactaacacacctgttgggaatgatccaatcaagtatgctaaaataaacaacgatgcaaattttaatgcaaacatatttaacaacactcctattaatctatcgctattttagcaaagattatcttttaaatatatggtgctggttaaattaatgaacaagtggaggaattttagtggcaaaagctaatacttatgatgattcttcaattcaaattttacatggcctagaagccgttcgtaaaagacctggtatgtatattggttcaactgatattcatggtcttaatcaattagtgtatgaaatcgtcgataactctgtcgacgaagccatggctggttttggtaaagaaattgatgtaatcattcattcagataatagtgttactgtaagagactttgggcgtggtatgccgacaggaatgcacaaatcgggtaagcccacaattgaagttattttaactgtattacatgctggtggtaagtttactgaacaaaattataaaacttcaggcgggttgcatggcgtaggttcatccgttgttaatgcactttcaagttatatgaaggttagagtcgttcgcgatggtaaagcttatgaagaagaatttaaagatggtgggcatccggtaggtacattaaagtgtgtaggaaagacaaaagagccaacagggactaccattacgtttaagccagatgagactatcttttcaaccacgaagtataagtatgagacaattcaggagagaattcgtgaatatgcttttctacttaaaggggttaaatttttcttaacagatgagcgtgagccagaacatcatgatgtttttcagtatgatgatggaattaaatcatttgttaagtatttaaacgaaggtaaaggcacaattagtgatgtcttttattttgaaggcaagcaagatggcatggaaattgaattttcaggtcaatatagtgatggatattcagaaaatttagtttcatttgttaacaatgttagaactggtgatggtggtacccatgagtcaggtgctcgtagtggatttacacgtgcatttaacgattatgctaaaaagcagggtctactaggtaaaaaagataaaaatattgatggttctgattatcgtgaagggcttagcgcggttttatctgttaaaatccctgaagaattacttgaatttgaaggacagactaagggtaaattaggtactccacaagcacgttctgctgtagattcacttgtttatgagaaaatgtcttactatttaatggaaaatggtgagctggctcaggaactagttaagaaggctcaaagggctagggatgcacgtgaagctgctaaaaaggcacgtgatgaaagcaggaatggtaaaaagagacgaaaaaaagaagttttgtctggtaaattaacgccagctcaatcgcgaaatcctaaaaagaatgaactattcttggtcgaaggtgattcagctggtggatctgctaagcaaggtagagacagaagatttcaagcaattttgcctcttcgtggtaaagtattaaatactcaaaaggcaaaattgcaggatatctttaaaaacgaagaaattaataccatgatttataccattggtgctggtgtaggaaccgagtttaatgttgatgactctaattatgataaagtcattatcatgactgacgccgacgatgatggtgctcacattcagatcttgctattaacattcttttatcgttatatgcggccgatgattgaacacggaaaagtttatattgctctgccaccgctttatcgcttacaaaaaggtcgaggcaaaaagacgcaagttcaatatgcatggactgatgaagaactagctgatgatgaaaagaaaatgggacgtggctattcgctgcagcgattcaaaggtttaggtgaaatgaacgcggaacagctatgggctactactatggatcctcaatcgagaatgttaatcagagttaaaattgacgatgctgctcttgctgagagacgagttactaccttaatgggtgataaagtagccgcaagaagaaagtggattgaagaaaatgttaaattcagaatgggcgaagacggctcaattctagaatccgaagatgaataaaagaaggttttaaatttaatggccacaaaagaacgaattcgagaaatgccacttgaacaagtaatgggtgaacgttttggacgatattcaaaatatattattcaagaacgtgctttgcctgatattcgagatggcttaaagccagttcagcggcgtatcctttatgcaatgtatcaagatagtaatacttatgataaaccatttaaaaaggctgctaaggctgtcggtaatatcatgggtaactttcaccctcacggtgacagctcaatctatggggctttagtgcacttatcacaagactggaagatgcgcgaaccgttagttgaaatgcatggtaacaatggttcaatggatggtgatggcccagcagctatgcgttatacggaatcccgcttaagcaaaatctctaatatgcttttgcaagatattgataagcaaaccgtaaacatggtgcttaactttgacgatactgagtatgaacctacagtcttacctgcacgctttcctaacttattagttaatggatcaactgggatctcatctggttacgctacagagattccaccacataacttaggtgaagtgattgatgcaacaatttatttattgaaacatcctgatgcttctcttgaagatttgatgaaatatgtaaaaggccctgactttccaactggtgctattgttatggggactaagggaattaaggaagcatataagacaggacgtggtagaattcaagtccgtgccaaaaccactattcaagaaattcgtgggcataggcaagaaattgttgctacggaaattccattcgatgttaacaaagcactattagtaaaaaagatagatgaaatccgtctgaataaagaaattgatggaatcgcagaagttcgtgatgaaactgaccgccatggtttgtcaattgtgattgaattgaaaaaagatgctgatgcgcagaatattttaaattatttatttaaaaatactgacttacaagtatcttataacttcaacatggtcgctattgatcacatgactcctgttcaagttgggctaaaacgaattttagcttcttatttagaacatgaagaagacgttgtaactaaacgtacgaaatttgacttagataaggcagaagctagattagagattattcagggcttgattcatgccatggatattttggatcaagtaattaaaaccatccgcgcttctaaaaataaagccgatgctaagaagaatttaatagctaagtataataaatttactgaaaaacaagctgaagcaattgtttctttacaactttatcgtttaactaatacggatgttaatgaattaattgctgaacaagacaagttaaataaattggccgaaaaataccgtaaattattatcagatcgtgcaactttagaaaaagaaattattaaagagttaaatgcagtcaagaaagaatttgctaatccacgtcgaactcaaatttcagaagaaagtgctaaagttgaaattgatgaaaaagccttagttgctgatgaacaggttagagtactaattagtcgagatggctatttaaagcgttcatctttacgttcatatcagtcaactaatgatgatgacaatggtttaccagatggtgacaaagtagtttatgaaaacacactatctaccctgactaacttgtatttatttaccaataaggggaatgtcatttatcgtccagtacatgaactaattgaaaccaaatggaaagaaacaggacaacacctatcacaagaaattggattagacagtgatgagcaaattattcgcgtctttgtatttgataaattgaatactgattgcaactttattctggctactaatgacggttatatcaaacaattggagttagctaacttacagccgacgagaacttataagtcacgtgcaatgacagctatcaagttaaagggcaaggatagttatgtagttggggtagatttgatcaaatcagataatcataaggaaatcacattatttactcatcgcgcctatgcaattagatatgatgttagcgagataccaacttcaggagctaaagcagtaggtgttaaatctgctaacttgaaagatgacgattatatcgtaaattatgtcctagttgattctaagtatgttgatttaatgcatgttgggctaattactcaacgtggggcatttaagcaattcaaacttaaactagttaataaagtttctagagccaagcgaggggtactagtactgcgggaattgaagaataaaccgcatagaattgttgctctaatgccatatgctcaagatcatttgttacatgtcactacttctagtgaccgtcatgtaaatattaaaactacggattatccattaggcgatcgttattctaacggctcatttgttattgatactactgttgatgggacgcctgtaagtattgaattgggaagacccattagtagtcaaaattaagatttgagtttaactaaaacaatatattaatctttaaaaacagtgttaagacatatgttttgacactgttttgttttggatagataatagcagtgttatgggacatggcttatcgtaaaataatattttaggaaagagataatcgttatgtctaaaagtgatactattttatcggctaaatcattgcgttattttttacaattgattgagacgatgaattatacccaagctgcacaaattttaggtattacccaaccggctttaactcagcaagtaaaaaaattggaacgcgctattggtgctccattatttggacaaatggggaagaagttatacctaaccgaagctggtaaagaaatggaagcagcagcgatagagttgctaaataccattaatggtgttattagtgacattcaagaatatacccagtcagataaaggcaatatttcaattggtattctagagtccgtacatgttgatcttttctaccaatttttacgttacttcaataaaaagtatccagaagtaacttttactgttgattactttgaccgcaaagagctatggcacagacttgattccaatatgattgatatggcgattatgtatatgccagatactactaataaaacaggagctaatttccgtcatcaatacaatcatcgtgatatttgccctgagcatattgttgtactgactcacaaggataatgtggaagcaggagggacatattctgttactcgttttggcaacagaaagtgggttgcatatccggagaattactacttatcaagattaatgcgacttaactttagtaaaaagattgatctcgttactccgtttaaaattgcatctactaaggaaatgatcaaaattgcagaaaatactgatcttgatacttatgtagatcagacttactatgaggcgcataaggatgagattaatttgactcctgtttatattaaaaatatgcctgagtttacgactgcttgtgtttatcgtagaggaaaattagatgttcctaggatgaagaaattactaacggaattacagattttcttagacaataacttggataggaaccataattttagtaaactattaagtgaagaaattaaataaaataattagaaaaagaggcaatttatttaatggaaaaagaatttgtttttggacaccaaaatccagatactgatgcaattggcactgctattgcattttcatatttgcaaaacaagttaggttacaacactgaagccgttgccttgggtgagcctaatgatgaaactgcatatgctcttaaaaaattcggctttaaagcgcctcgtgtaattaaagaagctgctccagaagttaaatctgttatgttggttgaccacaatgaaccacaacaaagtgtttcagatattgacaaagttaaggttactcatgttgtggatcaccatagaataatgaattttaataccgctgatccattatattaccgtgcagaacctgtaggctgtacttcaaccattgtttggagaatgttcaatgaatttggcattgaaattccagaaaactacgctggtttaatgctttcagctattatttcagatactttacttcttaaatcaccaactactacagataaggataaaaaggctgtagaagcattggctaagattgctggcgtagattacaaggaatacggcttagcaatgcttaaggctggtactaacatcagtgacaagtcagaagaagaattgattgatttagatgccaagagctttgaattaaatggtcacaacgtccgtgttgcacaaatcaatgttgttgacttacctgaagcgttagaacgtaaggaagcctttttaaaggcaatggatgcttcatctaaggataatggctatgatatgtttatgcttttaattactaacattcttgactcagattcagaagctttagttgttggctctgatgagactaagtcattattcgaaaaagcatttaataagcaacttagtgattcagaagttgaattacctggtgtagtatcacgtaagaagcaggttgttccacctcttactgatgcttttaatgcttaaaagtaatgatgtaaaaaataggaggtagggttaaccgcctcttattttttacctaaaaattaaaactgattttaggagaaaaatattgaaatacccacaattaaatttagaaaatcaacagggaccaacagctgtattgaaaaccaatcaaggtgaaataaaaattcaactttttccagaacaagccccaatgacggttgaaaattttattcgtttagctcaaaaaggctattatgatggtactatttttcaccgcgtaattagcgattttatgattcaaggtggagatcctgaaggaaatgtcactggtggtgaaagcatttgggggcatccatttgaagatgaactttcacgagaactttttaatattcgcggagcattatcgatggctaattcaggccctaacactaatggtagtcaattttttatcgttcaaaacaagaatatgcctaagcgttacataaaacagatggaacccgcaggctatccaaaggaaattattgcaaggcggaactccatggcttgacggtcgtcatacggtctttggacaagtaattacaggcatggatgtagttgataaaattgctaagtcgaaaaaagataaaatggataaaccactagaagatataactattgattcgatccaagtccaaggatcaaagtttgatgactaacaaaaacgtgctgttttttcggaataaacagcacgtttttgttaattattcatttcttttagaagggtgatcaaagacttacatacgcgttcagccttaggttctggtaattttcttaattcgttaataacttttttcatgaaaacgggtgtattgttatcatgaattttttcaggcttgatttttttagcacgataggcattgttaatgatatcgggtgtagtagtattcaaagctttggcaatagaatcaagcttctgaatactaatgttttggtccttagtcctttccacacgtgaaataaaatttacagaaagatcacttagctcagccaaatcttcctgtgttagtttctgttcacgtcttctacgagaaatttcttctcctaaattaatattcacaagcattcgatcctttcaagtaacttatagtctattatagcctatataaaattatgtaaaaaatgaatagactattttaatattctcaacatacacttatattaaataataagaaattatatttgtttataaatgtacatttttagcgtaatcagtgctattaggcactacagtttagaaactgtcaaatcttttgtgtaaatagttctttctcgtaaattgattttttaattatttatttaatcaaagtaggattctaaggtgtcctgaacctgaccaaagcctttatgaattcgattgaaataacggtcattgtagctcattgcctgaatgccaataaaagcatcaagcgactgttcagttggaaactctgccttaggcttagctttgcgcttgatcacattgttaaatgattcaatcatgttagtcgaataaattgaagctctgatctgcttgggatagttataaaagaccagcagatctggttctatgtctttcaagcttctgataacatggctgtaaaccttgccccatttggtatagaagtcatgcaggacagctgtggcttcttctttgtttgtctgttgatgtatctgcttgaattcgttcatgatcttttcacgatcgtcgacgcgtactttagcgcagatattgcgcatgacatgaaccaaacagcgttgaaaatgagctttaggataagtcctggccaaggctgttttcatgccaacaacaccatcagaaagaaaaagctcaacttgctttaagcctcgggatttcatgttttgaagcatatctgtccagacttcaatgttctcgctaggagcaatgcagtagtcaatgacctccttgtgcccattaggcttgatgccaatggcaatatagactgcttcacgctcaaatgtttctcggcgcaaaggaaggtatgtcgcatccaaatagacgcagaaaaacttgtcgcttagcttgcgtttgtggtaagcctcaacctttggaatcatctgcttggaaatatttgatacctgagctggactgtaatggctgccatacatcttttcaattagatcggctatttccctggtggtcacgccattggagtaaagcttgataatcatgctttccaagatatccgagtgctgcttgtagtcaggcagcgtgtgctgatgaaattgaccgttgcgatcccggggcacttgcacttcaattgggccaaattgcgtatcaactttgcggaaataagcaccatttctagagttgccagtattccagccatttctggcatagggatcatagcccagaaaggcggtcaattcagcttctaacaagttattaacagcctgttgtagctctttgcgcaataaatcatttattttgtctggattgaatagagcttgagcaaaatctttggtaaaatcattcatgaaggagttcttctttctgtatgtgtttttttgttcaaaccaatcatacgagaaaggaactcctttttctaatgtttaaagaaataaatttaaggaatcattcatccttacacaaactattttacagtctcacagtttatagtatagtcttaaattgaatacttttattgttaaaatagaaatgaaataaaagccccggatttaaaattgaagtgcaacactaagtgttaaacaaaaaggccatgaagacctaaacttgaagtgacgaaaaatcaagaaaggaagatcttcatgaccaattcaaattctagcatttctaagcactatcatcaattaaccagcgtacaacgtggacaaattcaagcaatgctggattccggcataacttcccgtactgttatcgctcaagaagttggctgccataagtcgacaatcagtcgcgaaatcaaacgcggaagcgtcctgcaaagagacagcagctatttattgtatgagcactattacgctgatactgcacagatttattatgagaagcgtcgcaaaaactgctatcagcgcaatccattgaagcattatgctgtctttttgagaatgctctccagacgctttaaagctaaatttgatgccaccagcatcgatgagttcgttggtgaattccaaaggactatgccaggctacccttgtcccagcacaccaaccgtctatcgctatattgatcagggcttgctggacataagcaatattgatctgcctatgaagctcaaaagacgcaggaacaagcgtcatcacagccatggcggtcacgctttgcacaagaagcatcttggcaattccattgaacagcgtcctaaggaggttgaagacagaaaagctccgctgcactgggaaggagatctggttaaaggcgtcagacgcaagaatcagcctgctttaatgactttgactgaaagaaccacacgctttgaagtagttatcaagattcctgactatcgggcaagcacatgccaaaggctgcttcaaaaggagattgacagacatcctgcctggtttaaatcaatcacgtttgacaatggctctgagtttgcggatatgaccaagatcaagggctgccagatttactttgctcacccatattctccatgggaaaggggcaccaatgagaactgcaatggtcttttgcgtcaattcttccctaagggcaagagcatgaaagacaagtcaaaagcttatgttcaacaggcaactgatgccattaaccacaaatatcgccgaatcctccaatatcacacagcagaggaactcttcaagcaatatatctcttcataacctaactgttgcacttaatttgacaattcaggatgaaataaaagctaaaaaaatatactaattattaagtttttaagcttataatgtatacaaggatataaaaatagattggggatttgatgagtttaaaagaggttttaaatagtaatcggcctgcagagtcacgacaattagcgtgtgcgttaactttttgtgggggatttattgatgcatatacatatatccagagaggacatacgctttccgctggacaaacaggaaacgttatcttttttagttcagcattagctgatcataatgttcctggaatgattaatcgagctagtacgtttattgctttttctttaggattgctattagtaggactttttcataaatatgtgaaaagtcactattggagagtattttgcttatttccaattttagcgatttgtattgtagtgggctttttgcctaaaagtgttcctaattattatattgtgcctgctattgcgtttggattggctattcaaaacgcatctttcagcaaaattgaaggcatgggttataacaatgcatttacaactggaaatttaaaaaaatcggttgttgcatggagtgcattttttttggtgaagacaaaagtaaacatacagctgccgttaattatatgatgttaacaattgcatttgcagttggagcaataatttcagctttactgcaaaaattattggtattaaaaactatttggattgcagtcatttttttaacgacgattaatttagtttatatcattgcattgagacgaaataaaaaaattgatttttcaaaatgattttaaaagcacttgtcataattggcaagtgtttttttgaagaggttgtgagtgagaagaaagcgaccaatctgaaaaataataattttataagtgtgcgtataattaatattatgtaaagccagattgaaaaacaatcaatttaataatagaagtcataattaatttaattgtttcagcaaataagtcttattttggatttgttaactcgaattcagagactgtaaaatattttgtgtaaggatgaatgattccttaaatttatttctttaaacattagaaaaaggagttcctttctcgtatgattggtttgaacaaaaaaacacatacagaaagaagaactccttcatgaatgattttaccaaagattttgctcaagctctattcaatccagacaaaataaatgatttattgcgcaaagagctacaacaggctgttaataacttgttagaagctgaattgactgcctttctgggctatgatccctatgccagaaatggctggaatactggcaactctagaaatggtgcttatttccgcaaagttgatacgcaatttggcccaattgaagtgcaagtgcctcgggatcgcaacggtcaatttcatcagcacacgctgcctgactacaagcagcactcggatatcttggaaagcatgattatcaagctttactccaagggcgtgaccaccagggaaatagccgatctaattgaaaagatgtatggcagccattacagtccagctcaggtatcaaatatttccaagcagatgattccaaaggttgaggcttaccacaaacgcaagctaagcgacaagtttttctgcgtctatttggatgcgacataccttcctttgcgccgagaaacatttgagcgtgaagcagtctatattgccattggcatcaagcctaatgggcacaaggaggtcattgactactgcattgcgcctagcgagaacattgaagtctggacagatatgcttcaaaacatgaaatcccgaggcttaaagcaagttgagctttttctttctgatggtgttgttggcatgaaaacagccttggccaggacttatcctaaagctcattttcaacgctgtttggttcatgtcatgcgcaatatctgcgctaaagtacgcgtcgacgatcgtgaaaagatcatgaacgaattcaaacaggtgcatcaacagacaaacaaagaagaagccacagctgtcctgcatgacttctataccaaatggggcaaggtttacagccatgttatcagaagcttgaaagacatagaaccagatctgctggtcttttataactatcccaagcagatcagagcttcaatttattcgactaacatgattgaatcatttaacaatgtgatcaagcgcaaagctaagcctaaggcagagtttccaactgaacagtcgcttgatgcttttattggcattcaggcaatgagctacaatgaccgttatttcaatcgaattcataaaggctttggtcaggttcaggacaccttagaatcctactttgattaaataaataattaaaaaatcaatttacgagaaagaactatttacacaaaagatttgacagtttcctgaattgaataatatgctgacaataatcaataaaacaaccttcaaagagaagtattttgaaacaattatggtaaagtaattctaattaaaaacaatgaaaatagttgagtaatatttgctagttttgcctttagtatctataaagccattttttatttttatgctatagctttctttaaaacaaaaattttaatgatcgctagataaacctatctcgcaaaagcctaattttggtaaatttgtgcttttgttatttttattgttttaacgttttgtatttcattttaaattcgtaaaaaaatattttataaattctttgctctttttgctacatacaaatcggtattaagtgcttttatatttattcttattccctatttttaagatttgctgcaataatacacatattgaaatttcttaaataaataatcaagcggtaaaaatgataattctactaaactcatgactcaagtcgctacttaaatctgtgtttttacatgaataagacatctaaataaagtttcaatcttcaaaaaatgctgagaatcactctaagatttctttttaatgaattaatttatcgtggttactcaatctttatacaaacaagcaacattttaattcattattatacctctatctcccctcctctgctgaccagggaagacgaaaaaagagccgaaatcagacataattcgtccaatcaggctctttgcttatctagctagaataaaaatctgaataaactcaatctgttgcaggtctaattttattcataatgaaggcaacgacgattaccaagataactgcacctaaaattgacggtacaattgccatgtccgcaaccttcggtccccattcccctaaaagggcttggcctagtgaagatccaaccaatcctgctaaaatattagcaatccagttcattgacttaccatgtccagttaaagcacctgcaattaagccgattactccaccaacaattaatacccaaatccaatgtagcattttgatcacatttgctttcttgcaaaatatcttatcacatttctgattaaacaaagcgctttctttaactatctttattttgagactgtaaaatagtttgtgtaaggatgaatgattccttaaatttatttctttaaacattagaaaaaggagttcctttctcgtatgattggtttgaacaaaaaacacatacagaaagaagaactccttcatgaatgattttaccaaagattttgctcaagctctattcaatccagacaaaataaatgatttattgcgcaaagagctacaacaggctgttaataacttgttagaagctgaattgactgcctttctgggctatgatccctatgccagaaatggctggaatactggcaactctagaaatggtgcttatttccgcaaagttgatacgcaatttggcccaattgaagtgcaagtgcctcgggatcgcaacggtcaatttcatcagcacacgctgcctgactacaagcagcactcggatatcttggaaagcatgattatcaagctttactccaagggcgtgaccaccagggaaatagccgatctaattgaaaagatgtatggcagccattacagtccagctcaggtatcaaatatttccaagcagatgattccaaaggttgaggcttaccacaaacgcaagctaagcgacaagtttttctgcgtctatttggatgcgacataccttcctttgcgccgagaaacatttgagcgtgaagcagtctatattgccattggcatcaagcctaatgggcacaaggaggtcattgactactgcattgcacctagcgagaacattgaagtctggacagatatgcttcaaaacatgaaatcccgaggcttaaagcaagttgagctttttctttctgatggtgttgttggcatgaaaacagccttggccaggacttatcctaaagctcattttcaacgctgtttggttcatgtcatgcgcaatatctgcgctaaagtacgcgtcgacgatcgtgaaaagatcatgaacgaattcaaacaggtgcatcaacagacaaacaaagaagaagccacagctgtcctgcatgacttctataccaaatggggcaaggtttacagccatgttatcagaagcttgaaagacatagaaccagatctgctggtcttttataactatcccaagcagatcagagcttcaatttattcgactaacatgattgaatcatttaacaatgtgatcaagcgcaaagctaagcctaaggcagagtttccaactgaacagtcgcttgatgcttttattggcattcaggcaatgagctacaatgaccgttatttcaatcgaattcataaaggctttggtcaggttcaggacaccttagaatcctactttgattaaataaataattaaaaaatcaatttacgagaaagatctatttacacaaaagatttgacagtttctttattttaagcgaatgaactatttcttgtcacttttaaaatatattatttgactgtcttatacttttctttagatttggggcatatttcttgccacgactaattctttattttttgtctattgtatatctcaatttgatttcaatttttttcggtttgattactgatatattaataaatgatctcatctattgccttttgagaactatatctgtagtctataaagtataaattatgtgagagatatagataagattctctccactaagtatggaggacataaattgtttaaaaggaaatcaattattaaattagcatgtgcaactatgttaacgaatgcaggtgtcacacttttatctcaaatgactcgtttctctgactcagagagcattgtgcaagcttcatcaacatcagttgttgctaaagcccttggaattgatgttgccagctaccaaagcgcagatttaactgctcatgccaaggctggttctcaatttgcaatcgttaaagttagtgagggaaccagttatcgcaaccctaaggcagccaatcagattaaatctgctattgctaatgatatgatgccgatggcttatcattttgcaacttttagttcaagttcatcggccgctaagcgcgaagcgcaatacgcaatttcttctgctaaggcgttgggattaccagctggctcatacttagcctgcgattatgaaactggtcagggcaatatcattactaatggtaaaaatgtgacagctaaggctattattgcctttatggatcaaattaaggcggctggctatcaaccacttctctatgctagttcttccgttttgcaaaacaatattaatactccatctatcgtgaacaagtatcctaattcactctgggtagccgcatatgcgatttcaggccgagtagaccaacccaactttaaatacttcccttcaatggatggtgtcgcaatctggcagttcacagataattggcgcggaatgaatactgatggcaatattacagtcttgccattatcaatcgcaggtaacgcggcagtttcacaggctcctaaggcttccaataccaagaaaacagctacagttatgtacaagtcatatgtttatgacaaaaatagcaaccggacaaatgatttttataatgcttacagctctattgcttattatgacaataaggtgagaattaaaggcaaatcaatgattcgtgtcggtgaagacaagtatgtgatggcaagtaacgtactaggcaattcacgcgtctttaaagctgatgctaaagtgtataaaaatgatggcaccattaatacaaaatggtctactaaaaaatccggttcaccgatcaagacttatggccctaaacattacatcaataatgaagcttactatcgaattggtaaaaatgcttacgtcaaagcagacaagttctaatttatttttagcagcaaatatttgctgcttttttgatgcatccctaaaacgtaaatgaactgacaaatcatttccaatttatttatctgcatcccttttttatccatgttaaaattaaggcattatatagaaacgaggataagataaggatgaaatttaaaaagaagttagctttattcttaggtctgggagtattattgctttctctgactggttgtagtgattttcaaaactgggaattatctatgcgctctaagattggggcattgcccttaacagtatcaacgtatgattctaatggacaaaagatcgaccagatcaaagctaagtcagttaatattcatactgataaaaagatgtcacagaaaagtagtaatggcactgaacattctagcgtaattgatgttgactatggcaataatcgaatgattcacgttggttctactatgattgcctatgaaggactgaaaaactacgaggatgcatttaacaaaaaagttaagatcgacgatcaaaatcgttctgttcctctgttaaatacaatgtatcagaattttaaaaacgattggaatggtagctcaagagtagtaatgattagaagccaattaggaatgccgattgctgtctttattggaaatcacgtctcaattcataagagtgatatgaagaatgcaactcaatttgtgattgatggtcatcgtctatttgtttaccgtgctgattacacagtttatccaatgtccagtttaaaaagcaattaactataaaaagtgtcaatcctcattttaaggactgacactttttattatttatcatcaattaatgcattaaatgcttcattagtttcaacgatgtcgctcattacttgattaatccagtcattaagcttatcgttatcgtagttttctaaaccgccttcggaatctccaatgtccgcaataccattattgaaatctactagttcagtaattaacttttgagcaaaaatcttagtggtaccaccaaagtttttcgcaaaattatttacatccccatatgcatcggcaatatcactgaaaactgtgacagttttaccaaaagtctcactcaagttatctacatctgcttgagttggtacagtcaattcttcatcttcattattaagttgttcatctaaacgaacgccaatgtcgtttaacactaagtgaccatcatatagacgattcagtaatttgataccactagggtttttagcttggaagtttacactaatttcttctgtcatactttttcctcatctcacataatgtattttcatctattgtacaatttttagccaaaaaatacgactaaacaaggaaaataagcttttttcgattctttataaaaaatgttatattttacttgaacattagcaataaagagcataaaataaacgattgaaaagtgttgtaccatacaaacaacatatgtttgtaagtaatgtttgaattactaaatgtaatttgcccttacttactgacgagcaatcactgttgctataattagaatgctaagagttttctataagcgttgctggtattctagttatagtgacatgattatctaagttaaatttagttgcaatcatttttctacgttagtactatagatattcacgttcgaatgagcgcagtaattttaaattagactgttttttatcacctattcctgagaataggtgatttttttatgattaacgtatttgtatgatataatataaacattagttcgcaaaaggagtagatatggaaactgctaaatacctagaattgatccaaattgaagtaaataaattgcctgattttgttaagcaatttaatcttggtactaatcattcattaactactacttaccagtacttaactgaaattcgacgcttcttcgattggctacgtcaagaaaatatctcttctgcttcagataatgctcatgttactacggatacattagccaacttacgtcgcaatgacataatgctgtatattgattatttaggacatacccgtaataagcaaggccgactaaactcccccactacgattaatcgctcaattaatgctttacgctccctatttaagtttttaaccattactgccgacaataatcatggtgagccatattttgaacggaatgtaatgcttaaaattaattctttaaatgatacgcaaacacttaattatcgggctcatgtacttgaaagccacatgtacactggtaagttaaaatttgaatttttgacttttattgatcaggactatattaaccattgtaataagcaagcaaagattggttttaagcaaaacaaagaacgtgacatggcaattgctgcattaatcttaggtaccggcattcgggtgtctgaatgtgctggcgttgatttgagtgatttaaaccttaaggatgctgtactagatgtaactagaaaaggcggacaaaaagatagtgtaccaattgcagaatggacacttccttatatcaagcgatataaaggtattcgtaatgaacgctatcatgcagatagtaagcaagtggcattctttttaactcaatggcatggtcaaacgcggcgaattacaactaatgcaattgaaaaaatgatcaataagtattctgcagcttttggtcatccccttaccccacataagttacgtcatacggttgcttctgagctctatgaagtaactaaagatcaagtgcttgtagcacaacagctaggtcaaaaaggcacttcagccaccgatctatatactcatgttgatcagaaaaaacagcgtgcggctctcaatgagatctcaaaaaaaaatcacgattaatcaaattaaatgcaaaaacgagtttggctattcaattccaaactcgttttttattaatgtttcaatttcttgtaagcttttttggagccacgatctagatcacgattaaacttataatcttgccagtctttaacaaagagtaaatctaagttatatccttttgggtacaagtctttagctagtcgtcttaattgtaaacgtctgagtggtacttctacaaattcttttgtcacaaatatctttgctgcattttgggtaggaagatatttataaaagattccttcttcttttaaattggtagcatatacaatatcacctttatgaaattcttttttaacaaccaggttgcttttgtttttccgctggtgaacgaaacgtttttttaaagataaaggtaaattattgcccgctaatatggcttctgcttgatgcaaaacattttctggaatacctgattttttggcgatccatagtgctcgactattaccaatacttcctatctttaacttataagtaggttgcagattttttaagtcaaaatccattgcagctgtgataaaaccatcatgctgcttagcaaaatccttaatagagctgtagtgtgttgtggccatgattaaacagccacgtaaatacaactcttgtagaataccaatagcgagtgcgcttccttcatttggatctgtccctgtccctaattcatctaataatactaaactatggaattgagcatatttggtaatcatggcaatatctttcatttcggctgaaaaagtactcagagaattatctaggtcctggtgatcacctattaaagtaaaaacgtcatccattaatggaatatcacatggtttatcgcttggtaaaaacagacctagttcggtcattaaaatcatcaagccagtagttttaagcgcgacggttttaccaccagcatttggtcctgtaatcattagaacactattttcttgggttaattctaaggttaacggaacaggattaatgatcaagggatgccgcactgcacgtaaaacaagagaattttcacgattaattttaggcctaatacaattatatttttgtgcaaactttcccctagcaaaaatcatatctagtaaagtgattagttcaatgttacgcttaatatcatccttcacgtcgtatatttttgcagttaaagcacctaagattgctagttctagattacgtatttgtgcctttaaattggttatttgctgatttagacgaacaaccttagcaggttgaaagtagacggtttgtccaccattagaaacagccacaatagtccctgacaattgatttttgtagtttgctttaattggaatggtagcgtagccctctttttcaacgatcattgcgtctctaatcattttttgattaggtttactagtcaaaaaatgatttaatgcagttttgagttcagtaacagatttctttaagtcgcggcacatttttgctagttcacgatctgcctcatcgcgtacttgaccatgttcaatagtagtataaatagcatcttcaatgtctggcaatagcgtcatgtcttggacatatgcattgagtaatggtgctagctgctcatgtctggctaaaaagcgttgtagtaggcgatttactcgtaaaaattctgctactttttctagatcatcaggagttaagattagtcctttttcagctttagtaattaaatgctcgatatcctcagaactggcaaaaggaatgtgctgccgtaatttcaaaatcttcacggcttcttctgtttcattaagcagttgttctactttatgtaaattgctacttggttggacggaacttaattgttctttggcagcaatagtaattgcctgttgagctaagatatctttaacttgagtaaagtttaagttttgattattgttgatatttttcaatttgatgtaatttccttatgtttaatttaacgctgattgtaactaatggcttaataagtatgcttgcagacatatgcatttcctcgaatttctataatttgatttaaaaatgattgtaacataaaaagaacattaaaatatatactatagtaaaacagttattaaattaattcctatattttatgataaccatattactattgcctactatagcaattttgaaactgtcaaatcttttgtgtaaatagttctttctcgtaaattgattttttaattatttatttaatcaaagtaggattctaaggtgtcctgaacctgaccaaagcctttatgaattcgattgaaataacggtcattgtagctcattgcctgaatgccaataaaagcatcaagcgactgttcagttggaaactctgccttaggcttagctttgcgcttgatcacattgttaaatgattcaatcatgttagtcgaataaattgaagctctgatctgcttgggatagttataaaagaccagcagatctggttctatgtctttcaagcttctgataacatggctgtaaaccttgccccatttggtatagaagtcatgcaggacagctgtggcttcttctttgtttgtctgttgatgcacctgtttgaattcgttcatgatcttttcacgatcgtcgacgcgtactttagcgcagatattgcgcatgacatgaaccaaacagcgttgaaaatgagctttaggataagtcctggccaaggctgttttcatgccaacaacaccatcagaaagaaaaagctcaacttgctttaagcctcgggatttcatgttttgaagcatatctgtccagacttcaatgttctcgctaggcgcaatgcagtagtcaatgacctccttgtgcccattaggcttgatgccaatggcaatatagactgcttcacgctcaaatgtttctcggcgcaaaggaaggtatgtcgcatccaaatagacgcagaaaaacttgtcgcttagcttgcgtttgtggtaagcctcaacctttggaatcatctgcttggaaatatttgatacctgagctggactgtaatggctgccatacatcttttcaattagatcggctatttccctggtggtcacgcccttggagtaaagcttgataatcatgctttccaagatatccgagtgctgcttgtagtcaggcagcgtgtgctgatgaaattgaccgttgcgatcccgaggcacttgcacttcaattgggccaaattgcgtatcaactttgcggaaataagcaccatttctagagttgccagtatttcagccatttctggcatagggatcatagcccagaaaggcagtcaattcagcttctaacaagttattaacagcctgttgtagctctttgcgcaataaatcatttattttgtctggattgaatagagcttgagcaaaatctttggtaaaatcattcatgaaggagttcttctttctgtatgtgttttttttgttcaaaccaatcatacgagaaaggaactcctttttctaatgtttaaagaaataaatttaaggaatcattcatccttacacaaactattttacagtctcgcaattttactataacattcagcactagtatctcaactgtaatttttaattacaaatctattatcgtaaaaagggtaaacaaaaaagaccatagtttgtactatggtctatggctatttgttcttattttaattcgagcttatcaatatcaaccatccatgcaattgcaattgatttctctcctaagtgtgtagcgattactggactaaattcagctacatcaactggcttatctggaaagttttcattaacaaattgcttaatttgctccgcttgctttaaatcatttgagtgaaatacaaacaagcgtagcttatctttataaggcaaatttgctgtcttctctaaagttaatttttctaccttagaaacagcacgctttaatgatctgatcttatcaaaagcaacgatttttccttcatcattaaaagttaacaaaggcttgatttgaagcattgtcccaataaaagcaccggcattgcttaaacgaccaccacgacttaagtttttaagatcatctactacaaagaattcatcaattgtcttacgtatctcatctaacttctttaagatagcctctggttccataccattttttatcattcttgcggcagctaacaccaagtagccttgcaatctaactgtcatcttagaatcgtatggatataaattatattcaggattgttatgtgccatatttaccatattttgataaaagcctgagataccactggacaaagtgatagcgataatagcttcatagccttctccgtgtaatttattacataattctatcatttgccccatgctgggctgtgaagttttaggaaaagcagcaccttgtctctccatctcaaaaagctgggtggaagtgatattaacgccttctgaatattccttatcacctacgatgacaggaataggaactacattaatatcattatttttaacttcttgatcagttaagacactagtactgtcagtaactaatgcaattttcaatttattaacccttcccatatctaatttagcatagaaaaattatagcataaaaggcacctatcacgcaccctattccattttttctagggtcatagaagtatcagcgacttgatttaattgcttaataaataaattagcagcatctctgtcaaaatagacaaataataaattctcaatcttagtcagagttttttttagttctttagctttagtcacgccagcttcacttagattcacaatcttgcttgaatctttttccgatctagtgatattaataaagctcatagtcttcttttgctgcaattgacgacttaaggttgataatgaaatattaagcgcttctgccagcttccccatcgctaatgcttgatttttgttttcatcaaaaaatagcaaaattcgagtttgtgaaatatttaagccgcatttgtgatttatttcttttttcacttgatctgcgatcgtactaaaaaataatacatccattcgtatagtcctttttctccaatgtagattactatatacttgtattttatcatttaatatggcatttgataataccaaaaggctaatttatcagtaatattgtataatacaatgcactttttatgttgtaatatacaacttaatgatatagcagacctcgcgtgaaacatttactactgtattgcaggtttcaattatgattagctataacttataaatataatcattttagaatctgactaaaaattgatataatattacacgaactttgaggtgatatttatggcatttgatggattatttatccatagtttattaaaagacttagtccctactctggtaggtggtcgcttatcaaaaatttatcaaccatttgatcaagatctagtcttaatttttagaaaagatagaaagaattatcaatttttaatttcggccaatgcacaatatccaagaatgtatttgactaaacaaaacattgcaaatcctgataaagcacctatttttgtcatggttttaagaaaatacttagaaggttcagttttgcaatcgattgagcaagttggcttaggtcgaattgtcaactttcattttagtaatcgaaatgaacttggtgatcaagtcaagctcatgctttctgtagaattaatgggacgtcatagtaatgtcatcctttataatcaagaagacaatcacattattgatttacttaagcgaattaatcctgatgaaaatagagcgcgtgttttactgccaaaagcaaaatatgagttgcccccactaaaaccaggattaaatgggttgactctatcagaaagtgaatttaaacaattaagtagtgaaaaccagcctaatgaaattgctcaaaaaatggatggcttagataaagatgatcgaactgaattattaggctatcttgaagacgattacacttattcatcttttaagaccttttttaatcagtttgacaatccgcgtgcttttattttaaaaacacctagaaataagcgtaagattttttgttatttgccctatcatttagatttagagaaagaaagctctaatccagatctgaatgctggcttagatgaattttatgaatatcaggcaacacgtgattgggttaagcagcgtgcaggacaagttgaacgtgtagttaagaatgagcaaaataaactaactaagaaagttaaaaaacttgagaagcaattagatcttgctgaaaattcagagggctatagaattaaaggcgaaattttaaatgcaaatttggctcaagtaaaacctggaatgactaaagtttcattacctaactattacgaaaataatgctccattagagattaaattagatcctgctctctcccctgctcgtaatgcgcaaaagtattttactcgttacaaaaagttacgtgattctattaagcacattaatgaacagcttcgtattgctaaggatgatattcgttacttggattcaattcaaacagctattgacaatgcggatccacaggatattgatcaaattacagatgaattgattaatcaaggatatttacgtaaacaaaagaaaaataagcgtaggaagaaaatcattgaacgcaatttaaatgaatttaaactttcatctggtaaacacgtattggttggtaaaaacaactatcaaaacgattggcttactcttaaaaaagctaataaatctgattactggtttcatgttaagaatatgccaggctcacatgtgatcttacgcgatgatcagcctactgatcaagatattaaagaagcggctgagattgcagcttacttttctaaggctaaaaattccgctcacgtacaagttgattatgtgcaagacaagcgtgtgaaaaagcctaatggtgctaaaccaggatttgtaatctacactggacaaaattcaattgaagtaactcctgaagaaaaggaaattatgaataaaaaaattgaaaaataaaaatcatcgaactagttagttcaatgattctcataaatgcaaagtcatatcgactttgcattttgttttgcttattaaataggttgagtagttaaagccaatgattctagaacgtctaaaatcaattccgctgtttcgatacttgagaaaacaggaatatgtgtattcagcgcttcatctctgatgcgcgatgcatcttcgctagctgcatcagacaaattagtaatattaacaaccatgacgatcttatgttgacgaattttatctagtagatttctagggtctttatgaaccttctccactactccagtagtaatcccagcttccgcaaacatattagctgttccttcggtcgcaattaatttgaaacccaagcgatcaaatcggcgagctagttgggtcacgcgattcttgtcttcatctctgactgaaataaagattgttccataacttggaatatgtaaatcacttgcttcatatcctttgtataaagccttagctagttgagtatctcgacccattacagaacctgaggatttcatatttgaatcgaaagtattaccacttgaataattaagaaatgaaaatactggcattttaatatgaataaaatcgctgttttgccatagaccattaggatatcctagctctgctaaatttttgccaattaaagcttctgtagcacaagtagtgatatccttatctagtgattttgataaaaatgctacattatgacctgcatatggtttaatttgcaatagatataggtcattatcaacgaataaatagtgcagattaaaaataccttttgttttcagctgcttaattaatttaattgactcttgctcaatctttttttgctgctcttcggttaaattttgcggctgaatcactgcaattgaatcagaggcatgcgaacctgtttgctctagatgttcaattataccgggcaaagttacattggtaccatcagagatagccgttacctcatatttgtgtccctcaataaagcgagaaatagttatttgatcaagatgattttctgctaaatatttctctattgcaggaacatcataaacaactgcagatttttgcttgttttctttattcataccaccaattaaaagtggaaaaccatatttagaagcaaaagcgaaaacctggtctgtatcagttgttttatttaatgccgggacccgctttaaggtagtagattgttgatcaagcaaagtagtaatcttatcccgcggatcgtcgtttgccttttgcccaataacgtgcaaaccacatttttccaactctttactcaatgcactgattcttttgccagaaaattgaactaatacatcagaaatattttctcttttagcaacagttagaatattttcaactgtaatggaatcaaaataaactcggtcaatattcttataccttgatgaaatcgattcgtcattatttgatagaagcacagtaacatagccatacttatgtaaagtatcggccgcgtgagcaatcatatagtcaaactcgctagtaaccgaaacttgaagcggcaacatgcccaaaatcaagatctttttttcagcatttaaagcttgtgcttcattttgaacatcatatgcactgtagtaagcacaaacattaggtttatatatacctgctgagccgtcgatcttcaaatatgatggctgcaagtcaattttattaatcaaagagcgaacttcagtaactgatttttgtaaaatcttagctaataatgggttaaagaatccatagactttagcttcttgcagcaaatcacgcgaaggctgctccttctcttgtaataactttttgccaagtcttacaatgtgaagcaatttctgataataaaccggatgcaaatgtgttactttttgtaattcagaatatggaatatcttgatcaattgcggctaataatttaactaaatgcaattcatcaggatgtgccaaatcattcaaaatatctgcagtggatttttctttttcttttataaaagcatgccaacccaattctaaattaatagttgcatctaagcctttcagaaaagcagtttcaaaattacggcctacacccattgcttctccacttgcttgcatgcgacttcctagcaaatagtggttatagccggattcagcaaatgaccaatatggcattttaattgctactgcatctaaggtgggttcaattgaggcattaagtccagatagaggatcggtaatctcattcagtcgataaccgatagcaactttgctaacgacatatcccacatcatacattccaattctttgagcccaaacagaacttcgcgtcaaacgcggacgaatcgtcaaaagcttagatcgaatttgagttccatggtgtttaatcgcaaaatgaaaactagcaaatccaatgagatcaagattagacatgatttttctaacggttattcttaactcttgaatatgatcattgtttagggttaatgatggcatcacaactgcagagtcacctgaattaatacctacagcttcaatagatcccgcaaaattgataaaagctaaattgccatccttatcacggattacgtcaacaattacttcttcccaactagataagtcttcagttaagcgataattcttccatgtaaaattatcattttgcttttcttctttaaagtaactgattaaatcggtaggatttgcaaattgcaaatgttcgttgtgtacaaaacggttgtacttagtaactaatacgggaaaagtgactttgtcgttaatgctttctagcgcattatctaaattatcctgaatactctgattaagttcccaagattgcccggtatcaatatgtagcttagtaagcaactctgtctttttctgttgattccccatttgtagagcacgcgaattcaatgttagtaactgaattcccatttgttctaaaacgccatcttgtaataacttatgtgcaacctttaaaccattagttgaaccataagctgtcataattgcatctggctcttccatccgtagaattcttttcaggaagtcgagagtcatcggttcaagatagactgttacaccaagttttttatcagttgaaattgtagctggattaggattgactagcacaacttgaatgccttcttctgtcaaagcatcaattgcttctgttgccataagatccatttctgctacactaccgattaaagtagggcctgatccgataattaaaactttatctaaatcgttttctaatggcatataactaccccatcatctgtaaaaaataatcaaaaatttcatctgcatcattagtgcctggtgctccttcaggattaaaagcagtggcgatcaatttgtccttactgttccagaagcccgccatcagttcactgtgtagatcaaagtattcacgattcatattcatcttcacactatcaggcaacactagttggtcaatattcatcgctgtttgccagatagcattactattttgttcaatcactggataattaataccatcaaattcttgtggtaattgaaccagttcaaagccgagataatcgctcaaagttaaaaaacctaatccgattcctaaaattggatacttaccataaaaatgatctaaaactggcgttagctgattaattacttcttctggttttcctggcccatttgaaataatcattccttcaggacgtaagttttcaatatcaatcggactggcactgtatggtaaaactgtcgtatttacttttcgtaaagataaagcacgcagcattgagtgctttagcccaagatctagcacagctacagttcgtccaacattaggggatgcatatgcattcttagttgaaacagtcgcagatttatttttaggtaaaactagtgctttaatctgatcaaaggcatgctcgtcattagtatccatgatcgaagccttaattgtaccttcttccattaagcgatgaactaaagcacgagtgtcaactttgaaaattgcagggatgttcttttctttcaaaaaagaacttaaatcttcaaaattttcactatctgaaatatttaatgcaatatcgttagcaataatccctttaactacgggatcaatactttcataatcaatggcattaataccgttattaccaatcattggtgaagtaaagactaaaattttaccagcattagtaggatctgttaatgcttcttggtagccaaaattagccgtttgaattgctaattcaccggttgaaataatactggcaccaattccttcacctggaaatgaactgccatcttctaaaatcaaataccgtttcatattatcacttacttgtttgttctagttgagccaacgtttcttgaaaaatttgtggtggttctacactaaactctagccattcgccagtacttggatgtttaaatcctaatactttagcatgcaaaaattgaccatgacctttcaaggttttacgtggaccgtataatgggtctcctgcaaccggatgtccaatatagtcaagatgaactctaatttgatgggttcttccagtttcaagctgacactcaattaagctataatccttgaactgctcaagcaccttgaagtgagtaatagcttttttgcctgtttcaactaccgccattttcttgcggtcatatggattgcgaccaattggtgcatcaattaccccattttcttccgcaaaattaccatgaacaattgcccaataaagacgtttgttagtcttatgagccaattgatcttctaatgattcacgagccttggcggtcttagcgatcattaataaaccagatgtatctttatcaatccggtggacaattccaggacgaaatccttctggtgattgtgctaaggccttggtgtgatataacaacgcatttactaaagtatgatctggatgacctggtgcgggatgcactaccataccttgaggcttgttaactacaatgacatcatcgtcttcatacacgatatcaagtggaatattttcgggtataacatctaacggtttaaccgctggaatattaacttcgattttatctcccgcctgaatcttataagatactttttcgactttgccattaactaggatattttggtctttaaccagttctttaactctagttcgagatagatcaggaatttgttctgaaacaaacttatctaaacgtcccttttcgttttttacttcaagtgaatattctttagtcatgttgttcttccttaccttcaataaaaattaagtaaatgaacacaaggattactccaacagtaattgcggaatccgcaatattaaaaatgttgaagtgaacaaaatcaagctgaagcatatcaactacatattttaaatgcaaacgatcaataaaattaccaacaattccacctaagatgagggctaaacccacatcaaacaaggtattcttgtactttttgttaaaaagaaaatacaagcaaacactaatggcaataatactgataatgtaaaaaagccacatttgaccagttaaaatgttccaggccgcaccattattttgcaaataattaaaggaaagaagcccaggaataatctggtgtacttctcccacagcataatgggcaacaatataattcttaagtccttgatcggcaagaaccacaactaatgaaataattaaatataaaaactgcatatctttttagaataatccgctaattttaccattgttatcaacatcgatatctagggccgcaggatgcttaggcaaacctggcatatctagcacatgacctgtggtaaccacgataaaatgcgcaccattttttaaactaatccctttcacatgaagcttaaagtcagttggagcacccaattcgttcttgttgtcgctaaatgaatattgggtcttggcaataattactggtaattgggccttacctaactttcttaattccgcaatttgcttttcagccttgtcactatattcaactccagctgcatgataaatcttggtagcgactttctcaatcttgtctttaacatcgtcatcatctgcataagttggagttaaatctgccttgccagagttagccaaatcaacaacagcttgagcggcttctacaccacccttagaaccttcgccatgataagtaactacttcagcattaataccttgttcttcaattaattgtttaagcaaagcaagttcttggtcagtatctgaagcaaaacgattgattaacacgatgaccggcacattgtatgaacgcatgttgttcatatgacgctcgaggtttttaaaaccttcttttaaagcatctaggttttcttcatctaagtgatcagttgagcctaaagcttgatacttcaatgcacgaacagttgctacaactactgcagcatcgggcgtcttgtccagatgtcttgagacaaagtccatgaacttttgcccaccaagatcactaccaaagccggcctcagttaatacatagtcgcttaaatgcaaagccaagtttgtcgcaatgacggaattggctccatgcgcgatattagcaaaaggccccccgtgcactaatgctggtgtgtgttccaaggtctgtactaagttaggcttcagcgcattagacaatagtgcagcaattgcaccttggaatcctaactgtttaacataaaccggttcatcatccttagtgtaaccaactagcatgtcaccgattctactctttaaatcgttaatatcagttgccaagcagagaatcgccatcaattcgttggctacagtaatggcaaaactagcttgatgttcaacaccattaaacttggagccttgaccaaccgtgatttttcttaaagcacggtcattaacatcaagcccacgcttaagtaaaattcggtcaggatcaagatttaggctattgtcttggtagatgtagttatcaactaaagctgcaagtgtgtcaattgcggcagttaaagcatgcatatctcctgtgaagtgtaggttgatatcttccatagggatgatttgtgctttcccaccacctgtagcaccgccttttaatccaaaaacaggtcccatcgaaggttcacgcaaggcgatcatcgtattctggtgcaactgattgtgaattgcatcccccaagccaattgtaatcgttgacttaccttccccagcgggagtaggagaaattgacgttactaatactaatttacctaactttttactagcacgagtcctgttaatggcttgccaagtaatcttagccttatcatgaccataaggttctaagtcttcctctttcaagcctaccttagcggctatttcattaataggtaattctttggtttcttgtgcgatttcaatatctgatttcattattgcttattcttctttctagacatcattaaaacagaatagctttggtaatcactttttagttgataaacttgaaaattacgccaacttgaaagcaaagtcatttgattgatttttacttttgaacgatatggcaacttgagtaatattttgtctccacccttttgcaagtaagaaaaggaccaagtataaactgctaaaagtaagaaaatgataccaactactattccaggtatactaattgctttgttcccttcatagcccaaaataaaggcgataaatagaacgattaagagccaagaataatagataattcctgcaactcctagaaacatgaaatgccgtttagattttagaatttagatcacaccctatttatttaatcatgtctattgtatcaaagatttaatcaaaataagagggttgaacttacagcaattaaatataagtccaatcctctatcacatttatttactttactactgctatttcgtctctaacctttatattgcttgaatcgatgccaggtttttgaccgtgaagattaaagtctaaatcaactgtcggttgaaacagtaaatgtactcattgaaagctcagtagccttggtatttttcgctgcttgaccccatgctctcaatactgcttcgggaattcctttagcattagtcaaatttacgttacttaatttattaccaacatggccgaaggaatcaccattatcaccaatattattaccaaagtttacattgcttaggtcaatattggataaattactatcgccatcgaacaaactagcaatcgatttagcattagataaattccaaccactaatatttacagattcaagacttttatcatgaccaaatgttgcataaatattagtaacacgacttgagactgtaaaatagtttgtgtaaggatggatgattccttaaatttatttctttaaacattagaaaaaggagttcctttctcgtatgattggtttgaacaaaaaaacacatacagaaagaagaactccttcatgaatgattttaccaaagattttgctcaagctctattcaatccagacaaaataaatgatttattgcgcaaagaactacaacaggctgttaataacttgctagaagctgaattgactgcctttctgggctatgatccctatgccagaaatggctggaatactggcaactctagaaatggtgcttatttccgcaaagttgatacgcaatttggcccaattgaagtgcaagtgcctcgggatcgcaacggtcaatttcatcagcacacgctgcctgactacaagcagcactcggatatcttggaaagcatgattatcaagctttactccaagggcgtgaccaccagggaaatagccgatctaattgaaaagatgtatggcagccattacagtccagctcaggtatcaaatatttccaagcagatgattccaaaggttgaggcttaccacaaacgcaagctaagcgacaagtttttctgcgtctatttggatgcgacataccttcctttgcgccgagaaacgtttgagcgtgaagcagtctatattgccattggcattaaacctaatggacataaggaagtcattgactactgcattgctcctagtgagaacattgaagtctggacagagatgcttcaaaacatgaagtccagaggcttgaagcaagttgaactctttctttctgatggtgttgttggcatgaaaacagccttggccaggacttatcctaaagctcattttcaacgctgtttggttcatgtcatgcgcaatatctgcgctaaagtacgcgtcgacgatcgtgaaaagatcatgaacgaattcaaacaggtgcatcaacagacaaacaaagaagaagccacagctgtcctgcatgacttctataccaaatggggcaaggtttacagccatgttatcagaagcttgaaagacatagaaccagatctgctggtcttttataactatcccaagcagatcagagcttcaatttattcgactaacatgattgaatcatttaacaatgtgatcaagcgcaaagctaagcctaaggcagagtttccaactgaacagtcgcttgatgcttttattggtattcaggcaatgagctacaatgaccgttatttcaatcgaattcataaaggctttggtcaggttcaggacaccttagaatcctactttgattaaataaataattaaaaaatcaatctacgagaaaaatctatttacacaaaaaatttgacagtttccacgacttgtatcccaaccacttaagttaatactttttacatttggaatactagaaaataaaagtttcagattagttacattggaattcaaagttgtagtagttaaatcaatggcagttgcatttggttctttattgcttgaacgtatccattaactatttctctagtaatgttgcgggcatttgttagatcaacatcagttaaggcattattatgtgcaaaaaagttccaagcgtttaccacatttttgtatacagtatcgcttagatcaactttcacaagcttttcagcgccactaaacatttgtgacacgtcactgaattgacccatattccagccagcgatgtttacattttcaagattcttgtcattttgaaacatagatctaattgcagtggcttcactaacatctaaatgacttagatcagcagactttaaagtgtcactgttcattaaggctgcggtcatgtcacccttagcataaactttgttcttatctccctcactgtcaatagtaatgttaactgcacctgcatctttgatagtttctaataagtctttagtgatatagactttatcatcagtagttattgttcctgcattgataaaatcttgggtattagggatgtaaatatttttattaccagtacccttatatttagttaaagtgtattgatgagaattttgatctaaacttccatcccaatctgcagtgttgtactgactattttgagtggtgttagcttgtgtcttactagttgaagctactgtagtagcttgcttattggtagaagtcgtactctcctgcttgttttcattagtagctatcttgttcttactttcaattgatgatccgacatttgagttatcatcgattgaattgttcttagtagttaaatcagtatttgaaagatcaactttgttagtcgattttgtcttcacaatactagtagtgtcttcagttttattggcaccatttgtatctacattattagaagttttagttgtggaagcaacttgctctgtagtagtttggtcctttataacactggtagtagcactatcagatgaatttgcatcaacactatcagcatgtactgtttgactagagtaactcataaaagtcaatccaattagtacagaaactgcaccgattgttattttacgaattgaaaaacgttgtttaatagaatcaatattattgtttctaaggaaatatcattaataaaaaatgaccgagaaattaatctcagtcatcttcttatcaataagggtatctcatttctactaccctactcgactagtaccattagcataattcaaagttacgccatcttgcacgttgaaaatgtaaatattgaaatgaactgcatttgagttaaccgactgcccttccatttcaactccgcgagccaatagttcattgccacgaaagaccggtgtcacacggtagcggacgtagttgcttcgactttcttttacataatcagcaacctgatcctcatagcgcaacatatcaggatcatttagctgccttgtacctgtcatcaaatttttaatgttgttgttctgtcctgttagctgataaccaatcaaatggcagcgattatagagccagccgccagcaactcgtttattatgccaaccagtaggatcaacatgtagtggttcgcgtctagcgcttggcatcagcgactgaataagcaatgcgtttgcggcagttacccgattcaaaccatcgaggttaccatattcttgccatgctccgcgattagtactcaagtcactcttagaaaaactaggatcgttgttatttactgtaatgatgtttttcccagaatagttaagacttgccagttttgcggcactaacagattcaatattgtgtttgccagtgtacttcttgagttctttgcgcagtttagcaatctttttgtctaggctaacaattttcttttcagtttgcttgttttcctgcgcaatttgcttggtctttttctcagcactgtggtcatatttgatgatagttttaaccttggcgatgacattttgacttagactaggattagtaatcgcaccatagccgccaaacaaaaacaacgtacttgaaacaagtgtaataattttcttcttattcatcacctttttgcctttctgtaaccagcattgattgcatcctgctcactattgaagtaaaccgcatttgcggaattcatatgatagcctgcttgtcctggtacgtgataaatcttagaattgacgttaccgacaattttgccagtttctgctgtatctaggtctccatgattgccgccaccattagaatgatgtgttgcagttgaacgactagattgagctgactcgttttgccgtgattgttttgctatttgagtagcttttttagcagctgcttttgcctgttctttttgctccttctcttgttcttcttttttatccttagcatctttaagttcggagcttagcttatcgtactcatccttcttcttcttttcttcggctaattcaaaagtctgctcttctaagacttcttcatcagtagtgcttttctcttgaaacttcttctggtgctcaatatatgctggttgagaatgtactaattcacgagtgatgtttagaccatatttatttaatagcagtttttcagtatcactaattttataaatacttcttcttggtgagattagtaaaccagctaattttaaatcactaagcgcccaagctactcgactaattgctactaaatcatgatatttagaaggatatcttaaattaacaagttcttcaggtaaattaatctctgtgacaacagcttatcaagctctctacctacccattcttctttagtactcgctacctctagcatgggacctaaaaatgcatcccaagttggcatcccattttcactatgttttaaagttttgtagtcaatcattttttatctttatcaacttaggcgtattactgtaatgtgttcgcccagaagcttttatattaagattgactggttgcatcaaatttacgctagtcaatattgcctctcctgactttaaactcgacaactgagctaatttgtctttatttaggaaattattgattgctttaatttcatattcaccagttaaccgatgcattaaaagtgttcctatctgatttaatactatagttggcacatctttggggctttgagtagttaaaaatagaaatattccattttttcttccttctcgtgctaacgtagccagaggagaaataaaatcatcttgagcatctttttctaaagcatatctgtgaacttcatcaacaaataataaagttggatgttttgtcatatcatgatttaataagaaattacttatatagtctacaattacttgtcctaatccaattgaaaatttggaatcatttaaacgtatatataatgatatgtcattaccttgaaattctaacatttctttattaaggtctttgagtatctttttacctttatctgtttctccaaaatccttatcttgagttttactatctacgtttaaaaataactcttttagattatacgtcttaatcaaatattttactttacgtattagccaagaattagctccatatgtaaaataatcaaactggtaggttccttgttttatacctttattccaactaagttttaaagaatctttctcaatttgtttatctaaattgtttatatcaaatgattcattaaaaactttatcagattcccactgaatctgaagatgcttgtactgttcttgatttgccccttcacagtcaagaatatcatttcttataaatctattctctgcctcggttaaatttaccttatttaaatgctttttatagtattgaacaaattttaatttttttattgcctctaaaagctcaatcacttgggaattatcatttggcctaaataaagaaatccattgttcatcagtcaaattagcagtattcaagaataaatttttccctattgtttttaaattaacctcattttttgaaaatgcatctttatattcaccagttggatctataatcaaaaattttccttttagcttttgatatttatctaaaatcgctaatgcactagttgatttaccagaattcgttgctcctacaatcataaaatggtgattaaataatccatcaacactaattttgaatggaatagctttcttttcatttaaattaaagcttgaaaattcaatttgattatcccttttattaatttctaatgaatttatatatttcttaatagcttcatcattacagatatatgccttatcaccaattcctactgttagatctccgggcaatacaaacgtatttttatcgtacattgccattagtttaatttcaatatttgggtaaataatatcatcattattttctattactgccttatgaatattatcagtattattaatcctagaacttattactttccctaagaaaattggagactgtaaaatagtttgtgtaaggatgaatgattccttaaatttatttctttaaacattagaaaaaggagttcctttctcgtatgattggtttgaacaaaaaaacacatacagaaagaagaactccttcatgaatgattttaccaaagattttgctcaagctctattcaatccagacaaaataaatgatttattgcgcaaagagctacaacaggctgttaataacttgttagaagctgaattgactgcctttctgggctatgatccctatgccagaaatggctggaatactggcaactctagaaatggtgcttatttccgcaaagttgatacgcaatttggcccaattgaagtgcaagtgcctcgggatcgcaacggtcaatttcatcagcacacgctgcctggctacaagcagcactcggatatcttggaaagcatgattatcaagctttactccaagggcgtgaccaccagggaaatagccgatctaattgaaaagatgtatggcagccattacagtccagctcaggtatcaaatatttccaagcagatgattccaaaggttgaggcttaccacaaacgcaagctaagcgacaagtttttctgcgtctatttggatgcgacataccttcctttgcgccgagaaacatttgagcgtgaagcagtctatattgccattggcatcaagcctaatgggcacaaggaggtcattgactactgcattgcgcctagcgagaacattgaagtctggacagatatgcttcaaaacatgaaatcccgaggcttaaagcaagttgagctttttctttctgatggtgttgttggcatgaaaacagccttggccaggacttatcctaaagctcattttcaacgctgtttggttcatgtcatgcgcaatatctgcgctaaagtacgcgtcgacgatcgtgaaaagatcatgaacgaattcaaacaggtgcatcaacagacaaacaaagaagaagccacagctgtcctgcatgacttctataccaaatggggcaaggtttacagccatgttatcagaagcttgaaagacatagaaccagatctgctggtcttttataactatcccaagcagatcagagcttcaatttattcgactaacatgattgaatcatttaacaatgtgatcaagcgcaaagctaagcctaaggcagagtttccaactgaacagtcgcttgatgcttttattggcattcaggcaatgagctacaatgaccgttatttcaatcgaattcataaaggctttggtcaggttcaggacaccttagaatcctactttgattaaataaataattaaaaaatcaatttacgagaaagaactatttacacaaaagatttgacagtttcgaaaattgtgccattactatcaatcaaaacatgataattaatagtattagggcgtaaaacatcactttgattgaagcgatacttcaataaactcatgttttctatttgaatattagcaaaaatagaagatacagtagatattttacctaaatagtattcacatttgtctacatgcaaatttttgtctgaactatcaaaaaagttatctatcaaactcatagttatcccacataataagataaatcataattataactacacattgttgctttaagaaaagcaatattatatcctcgatctctcaaatcatctaaatcactccagttgtcattaacatcttcttgttctgtttttttatcaaaattatgaatattataatcagtaatcaaacaatctaaacttgagttatgcttaattgcgtttataatcattctacttatgtgattatcaccaaaactaaaacccgaagtaactaataatgtattaggttggtgcaacttattttgaaatcgagacatgagatcaaaatagggttcctcatagctctgagcatatttattagaacttggaaaaatcatttttacatacgcgtggtgctagttaaatcgttctagacaataagccaaattataagctaaaattgcaatttccaaccggctttgaaagcctatcagactacgtgctcgattgttctcggcattgtaataggtcagaagcgaaaagtcgctttcaattgttctgcgaatagccatcaattgatgatcattgtgctttttagctcctgtcatatttttacgatatggtgtccaaagttcataacccatttgttttagctgttgatgcagttctttgcctaaatagccttcgtcgccaagaagatagtaattagatggatgggtattttccagcagttcaactgtctccctggcatcatgaactgatgcttttgttacgacataatcaagaatgtaaccgtcatcgctaacaatgacatgaactttgaaaccatagaagtaaattttcttggtggccttataaccaatgttggcataaccgcgaaaaattttagcacgatagttgcgaattggttggcaaacaggtaccggaaagctgtcaatgatcaagaaatgtccattcaggtcaacctttttattcatttcttgccgtatctgataaatcaattgcaatagctgacgtgaacgtcgattaaaacgtgagtgtgataaacaattgaaacattcacagaatcttctttgtgattcaattcctgtcttagcttgccagataagtaaagccaaaatcagactgtccgtagttttaatttgatcaatatttcgccgatgagtaaactcagccggtgcatacaaattatcactaaatctttaaaactaacttgtaaatggtggctaaaacgcttaagcttaaggcagttcaatcagatcagactcttttctttttgatactacaacttgagtctagtccgattggacttttttattaactaaaacgatttaactagcaccacgcgtatttttacatgattactgttatctctaatcgtactttttacctcttccacagtcgatttagtaactttattttctttttcaatccaattaatagacccatgaattttaagaagatctataacatgctttttatagataacttgtttagtattaatattgttaacttctttactcaaaacccactcatacatatcatcattgaattctttattatttccaaattcaaatccatcaaatattgtgaagttatctttttccagagatttttcaattgctaaatcataatttgtagtcgcaaccatcaatttactgctatccgaatgaattaaattaagcaactttaaaatcactttatcatgcttaaatggcattttagatgtactatcgaaattataatcaactgaatcaagtattgatagtaaaataaatctttttaatttttttgcttgtgataaacttggatttctgacttttttaccagacatctctgcgtcttgaatatataaatttaaatttgaaatatattcttctaatggaaaagaaaaccatgtactttcatcatcaaaattaactttttcaaatttttcttgttgatctttaggtaaaaagatcttagcatccttttcatctaaatattcttctaaattatttgttccataaagctgattgaaaatattccatgaaatatcttgcatagtctttccataatttgaattaatatttccattctcattagttacaactgaagctccggcaccaactaatagcacaacattactataatctttacttataaaacgcaaaacagcccttttgagaaacttatgaagttgcttttctaaaaacacaaaatcatgatcattatcatcatctggatttattttatctctataaaatttacttagtgctttctttttatcttgtttattatatttatcaggtaacgataactctatatctatttctttatctctgtacaactgcatacttaatctcctcgtattatataaattcatctcttaaaagttaattctaatatataaacaaattgtcaattttatcaacaattctattctgctccgctaatggtggaagaggtaatttcaaattaattaatttactcaaatatattcctttttgggttgtccctttcgcattagcaaaaatttgagttttaaacattgctgaaattaaaacataataaagaaacttacttaaaatattactactaataaccgcaacacttctttgagctgtaaaaagtttatcagtatcaacaactgcagcattacctaacgagcctacaatagtgagtaatacatctccctttcggatgtttgttcttttatcctcttttaaaaattgatcttcagaaacaaatctatttgataaagaaaaatctatttttccttttttaatgtttattgcagagataacttgttttccttcatgtgaattcggtgggggattatgcgtaccatcagtaatcctttttgcaatattccccaatctaacccattcccaactatcaggaatatcaaacggcttttcctcatcagtgatcggaggcaacggcttgctcttcttgatctccttttccttgatcatcttccgcttctcagccttaatcttctctagcaaaacactagctggttcatcatggggatcttgctcgactaattttccacgcattgccaaatccagcaccttcgacttcagcaaagtctgaagttttgcgtattgttgagtagaagattcgactttgcgaagcaaagcgaatagctgcgctattttagcagcgattcgactttgctcttcaagtggtggaagtggaacaagagtttctttcaacttttttgaattaattgttggtacagcagatccttttacaaagtcttttatgtccaagcttaaaaacagatagaatatgaacttgtgatttaagtcattgtatggtattaatcccccagtattaagatcaaccaatgaatcttgagacaaaattcttttttttgcggttaatatagctccaccgtttttaggaaaaataattgtatttttaggcattacttgtcggctatatttttctccaacccaatttttcacgttttccatatataagttattattattcatatctttaaccttaaagtatggataaatattatcactacttatgtcttctttcttgggagtttttccattttttagtaaacctacatcccccaatctaacccattcccaactatcaggaatatcaaaaggcttctcatcatcagtaatcggagcaagcggcttacttttcttaattttcttttccttaatcaactgctctttttcagctttaatcttctcaagcaatacactagctggttcatcattaggatcttgtggcaccagctttccgtgcatggccaaatccaagattttttctcttaaagcctgtgcatcaaaatctaaagtattagtcttcatcgtcaattccttctaacgccttattaagttccgcaattgcatccctaattgccttagacttgtcattcatctcatctaagatttctttcaacgaacggttatcgtgctcttcttcatcattcatccaagaaatatcaaggctagtattaggacgcttcaaaatttcatcaatcgtaaacttgcgccatctaccgttagaattcttctctttatcccaagtttcttttctctttgagcgatcgtcaacgcagaatagtttttcaaattccgcaaaatccttgtcacttaatggattacgcttaccaaatgaccgcatctgatgacgcatatcataaatccaagtttccttggtattatccttgtcactttcaccgcgagtaaagaataatacattggtctgcacaccttgagcgtagaaaatcccagtaggcaatctcaagatagtgtgcaagttgcacttgttgagcaagtcttttctaattgcttcgccaacaccatcggcaaacaatacattatctggcacaactacggctgctctagctttaccattgtgtttaagtgaattgtagataatctgcaggaagttcaattgtttattactagtcttataagttaggtcgtcacgacttacactgtcgtcactacccttcttggtaccaaatggcggattagttaaaactacatcaaaatctttcatccatttaccatttgaagataatgaatcccctagttccaatcgtccatccatgccatgaagatactcattcatcatggctaaacggtgcgtggtttcaactaattccataccagaaaaagcttcttttacttgaaattcttctttatctgcggacaaggttgaataatcatctgtttgatcttttaaatatctgtcagctgctaccataaagccaaaagtaccagcagcagggtcattacagcgatctccaattttaggctgagtcattctaaccatcatgttaatcaacacacgtggggtaaaatactgacctgctccagatttgacttcgctggcgtttttctccattagaccttcatacaaatcaccaaggccttcgtcacgagctgaccaccaatcaagtgcgtcaatatcttttattattttttccaggtcagcaggtttgtgaattgaagtagaagcatcagcgtaaattgaattgattcttggactattaaccacttcaggattacctaaatcaagtaataattggcgataaaagttacttaactctagtccttcctttgaaacaagattatcccattgatatttttgggggatatcatcctgttcaccttgttccttactcatttttaagaataagatataagttaattcagtaatgtaatcttggtaactgacaccatcatcacgcaaaatattacattcattccataacttttgaacgatttcttgattgttcacttaattttgctcctttaaaaattgtctcttttgaagatttccggtagatatatttgaatattagtaaatggatcatcattaatccagtcactctttttccgatacaacttattggcgtgatctactgcatcttgcactttatcaaaaatatattctcgataactattacctttaaagcgactataatcttgattaaaataggcagatctagacagtttctgtactagctcttttctagtataagaacgagtgacactttcaaaatgcattaaaatccaaatttcaaagtctattgaagaaaacataatagtaatatcattttttcgagcaagtttagcgcatttccttaattcatctttagaatgctcatctctatcgaaaacaacataagttttatctaaatgattatatttgccaaacttaactgctttttctactagacttttaccagacaaatctgcagcaactattttaactttaatatttgctaaacgatatttctgcttaagcatagtaaaatattgtttttcagattcaccttcacacagaattccaataattggattagacttagtcttatttcttattcttcccatgctcatccccatatttttcatgaatcatttgcaatacatctagcaaaccatctacatctattacaggaactgcaccgaatcggccttgtaagtatctcttagcaaacgaaatatcatgtcgacctttattacgtgcatcttcaaagtcaaagattgatttcaaatcactaattccgtgaaaatccttgtctaataaataaatttgatcaattcttaaatcgctgtctaatagctgaatatcatgagtagtgataataaactgattcaaattttctgttgaattaaaaatacgaactaaagcagctgcaagttcaacatgcagtgaatcatcaaattcatcgattacaatcgtcttctcgttaccattcatttgagcaagcatcattgctaatactatataaaataaacgacgtgtaccaacagactcttgtgttaatggaagttccccagaattaataacttcattttgatgataaatcttgtgaaccgtatatagttctttagttgttttaggataatcaatatttaaattctctacaatcttttgtaattgtggattcaacggattagtaggtacttctctaattctaatatcagagatattaaaatccgcaaaacttaagaatgagatcatttcttttttgaggtattcatcttccatcaaatttaaaagttcgtcaggaatatttactggatagccgctgccaataaaaatcagatcattaacaaaccacttatagatagcaatacaatctgcatcattttcagattgtgctaaatataggaataaagaattatctctaagcttaggaatgctgtcttccaaaagcttgttagagacttgaatgtcatttccatttcgagaaaaaatttctttttccttgttaccactaattaaggttaatgcttcactggtaatgctctctcgattgtaactaaatgaatagtcataaattttgttttttaactcaagcttcacttcaaagtaagtatcttcaatcttggacttttcatcaaacaaaaaaggataataatttaacttatcagttacggcttgagttggacgtgttactattccttccattgtttgtaaagcttgaatcaattgagacttacctgaaccgtttggaccaaataacagtaagctttttaataatgatggatttttacttgagaaagtattagtttctttcaatttacgtagtctattgcctgtctctgcagacaaggtagtgcgctctctaaaagaagcataatttttaacagtgaactcgattaacatattgtattcctccgtgttaatttaagtttagcacacgcctttttttatcacaacttttcgtgattaaaagcaaaaaataccagtaatggcatttttaaacatataaattctcattcaacacgtaaataatctgatcagcattttctggaaagatcttcttaatttgcttataacccccgtgacgtttaaagaaatagttatcatcaaaggctttctcagcatttggccccaatacagtagatgaaattaattggttctcaattctcttcaaccatttcttttgaggaatagtccaatcagctaaaccataaactttttgcatggcattatgaattctaacatcatgatccaccaactcagatccagccgcagcttgtctaatgaagctaataatatcggcagtggtctgaacatggttaacgtttttccatgcactttgcaaatcattttctttaaagccattttgctctagcttaagtttaatatttttgagttcatcaaaagttaaatccttcggtctagtagctacaacttgtaaggctggaatagtattgacgttttccttaacgaatttattgaagttttcaatataatccgctggtttttgattgccatgcccataacctcgacttacattaattactttgtctactgcgtctgatattatttgcttgggtttgacaggtttgatgtgatctaactgctcaaacttaggccattgctttaaaaattgggacttatctaacttacttaattcacgggcccattgatcaaccgaattaatctcagctagatgttggaactcatcacgtttagtatcatccaaacgtttaatttttctctcaacggcaccagccatatctacttgatactgagcggaatcctcatttgtctcaaagaaatcatccttgtgatttaagaagtagtgaacattatgtcctggatttttaacaacaggcttcatgtttgtcactttattcattgcttcatagattccgacggcatcataaatcgtaaatttggatttattaatttcgggacaaagtctggttgcccgtcccaacatttgctcatagaggattcttgactgaactcttcttaagaagacaatactagtaatttgcggtacatcaattcccgtagttagtaaatctacagttactgcaatattggggttggtttcattcttaaagtttttaatttcttgattaggatgccgaattgaaccagtaattttttcgatagcatcgtcatctacaggattactcacttttttgaatgcttttttcaataagtcaacaaccatatcagcgtgttcatcagttgccgcaaagattaaagttttacctaaatttggatcatttggatcaagatatctttgagctaattcatcacaaactacttcattaaagctacgtgtgataactctcttattaaagtcttttacatcaaaattcatattatcaggtaatttttctttattgatagttttttcatcctgatcaaaaagactaacttcggcaccctttttaaaatgaatcccttcttgagacaattgagtttgaataattactggtgcatcatgatccactaaccagccatcgaggacagcttgttggtagctatacgaatacaccggtttgccaaaaatatcaatcgtttgtaaagctggcgtagcagtcattccaatagcagtcgcatcaaaataatcaactacacgtctatattgactaacataatcttcttgactatagaattgatattctttatcgctgagctctttatcttctgcataaccacggtgggcttcatcaacaataatgaaatcatattgaccaacggatggcttatcatcactgtcttcactgaaaaataggcgtttgatcatcccctgaaccgttgcaatttgaatttttgttgatatttcaggtgccttatcactcaattcctttaatccataaatggaagaaattgacatcgtacctattttattatctttaattgcattggcagtctgctttcccaatgaattacggtcaactaggtaaagaatacgtctagctctcttatgcttaagtagtctgtacatcaaagcaattgccgttctagttttaccagtacctgttgccatggcaagcagaatacgcttttttccatctttgatggcattttccatcgcttgaattgcagcaatttgatattcacgatgtgcaaaatcaggaaaatcttgatcatctaccaagtcttgatttgcttcttctttatttttagcagaaagcttcaacgataaatcttctggcttatgaaattcctctagagcatatgcgctttctttatgattacgtgcatcccagaaccaaataccagatttttcctgatattgtttaagatatggacgaccatttgcagtatagatgaatggaactttgtaatcacccatttcatttgaaactagacgataatctgatctaaacggtacctctttagaatattccttaggctgtgccatttgccctacaatatcttggtcccactttttggcctcaacaattccgtagaactccaaacctttgaataatgcataatctgctcgctgaccattaggtagaacccattcagcaattgccatattgtgacctttttgcggttcagttttctgcgtccaattgttcaatttttgtgaatctacttcccagcccgcatctcgcaattgttgatcaattaactgacgtgtttctgcttcagttaactcatgttttttagcaaattgaacgttaatctggcgtctgcgttcacgctcttcaggagaaattatgacttcctgcaccctattttgttgtaattgctttatcttttcttcgagagctttgattttatcttcttgagttttaattaaagctttttgatcttgtggctcaacataatctgcaactttatccagagaataaacttctaaaaaccatttccataccaaataagcactctgatcaatttcaagcgcaatctttttggtagcaataaaatgatcgtcatgcgttgccttgttccgtcttaacctgatcaaattaagagcattcaaaacagtaggtggatattcattcttagaatatgccattttttcaattcgttgtttttggtttaattcccaatcacctaaatcatccaaatgcatgatttctttagttaattgctcaccgaaagtaccaaaaactgtcaaactacttctaggatcagagtaaattaagctttcagcgctggaagccaattttgcgtattcttgataatctttttgtgaagtttcaaagttagacattgtttttcctctaatattaaagtaaatatagttttattctacctcgaagccccatttaataacaagtagtgtaggtacaaaaaaagaagcaccaacacagtgcttcttttaacataaactaaataatcaatcgaaccctacttcgccaaaacatattcaaatcccaacatattggtatagcgattactacctatcttaatgtaatcatagcctttgatcctcttggtgccataagtttggacataattctttgtcctggtattctttgacttgatttcggcaacttttttaccctgggcatttaccacaggtgttacagtttgcacagtgtagtaatgtttgaccacttttagcttagatgcttcgaaattaccatacttaacatatttatttacatcaattttgacatttttttgccctttaatagtcataattgcttgaattttgtaaggggtccccttcttcagtaactttttcgtctttatacctttagcagtataaacgtatgcattactttgcaatttctttttcttgccaacagtaatgccatcagtgattaatgggctaatatcgactttgcgctttctaatggtatctgaagaatagccaaaccaaaatggactcttcttggtaacatcccatactggacgagttgttggatattgccaattacgtttgctgttataaagttgaacgtcaagctcacctgtaacttgaggctggtaatagttgtagatcaggttcatcactttttgaacctcataagtagttaactgatcagttcgtctaacgagcaactttttaccatcaagtgctttagtcgtattagttaaaaacttgtcagcttgactaaccgcaacttcactggcatttgtctcaccaacaacagttttagcattttgcaaataagtcaagaactgtatctttttatcatagtcagctaatttatagcgatcagtcttttgaaccttttctgcagtggcaattgcagacttattagttgccaccttgctttgtgattctgcttcaccggctgtgttgattggcgtaagttttactccctcaacctttttgacattactagccaagatatagccttcattatctaacttattagttttagcattagcttcacctgttgtatggtagaaaagttcagctttcttttcacttggtacccaaagatagagtgcttcattaattttgtggttgctatacattgcagtttcttcaaccgtattggtatagaactgtttagatagctcttgacttgtcttttcaccgtcaacattgtacaaaagaatctttttatccaagacaactttggtagaatcggccaattcaagatctgaatgattctctaaagcttgtggcaaattcagatcatcttctgatacccaataattagtgcccttgatccggtagtatgaatagtgatcatgatcaaagtctgtcaattgttgtgggaattgtcccgcataatcaactgtgatcttttgtcctttcttcaattcaatattatttggatctgtaccccaacctgttgaattaacatactttgtaatggttgaagtattcttattgaccgttacggtaattggtgcatgagtagtaagacgatagccgtcaatgtaaccgatgttggccaccttgatataacgaccggaacctaaataatagtagtcttttccattaattatggtataaggaatgcgatacttacctttttgagcctcataataatactttgctttactactagtagttttccgcttaccagcatatttgactacgctaccctttttgacaaaaccaacttttttgccagacttattgtaaatattggcattaaaaattgccgttaaataagcagggccagatattggcgttacataatctgaagaaatataaacattcttgcgtaaaggatagtataactcaccagcactgtagtcgcctggatcaaccgtcttaaaaaatggttttccatagtatttaatcgtgctgcctttcttaggtgcagaaatatgatccaaataattgcccgagcgattgtacaacataatatgtgaatcaatgacttttaaggaaccagttgcattgcttttagtagctgcggcaactgatgtttgaacgtttgaagttagtggtgctgcggcaattggagacacagccaataacgcagtagaaattaagataagttttttattgattttcataatgaaccttcgatctaataaatgcagttaagatttgatcagttagtactcatatcatcattatagcagttatagttatttattccttgatattgagcctatcaaaaaagagatcgaaacccagtgtctcaatctctttcgattttattttgttttcttcttacgagtccataatccacttaaactcaagccagacagtaataaccctaaccatgaaagatcactatcttgcctaccggttgctggtaaaacagacttagaggccgatctcggcgtaatttgttctactgtatcgtttttcataatagaagtttccgttttacagcaactaatctcactaccacttaagcttcagtttatggctactttgctctacctgtaaaaatgaatcaacgtagcgcttaaaaccaggtaaatatttggcaatcaaatgatattctcgtgaattaacaatttctttcttttgggctgcagaataattactttcacctacaaaaaagttccaattcaattgatctataaattttatgaccacgttagcatcatttttatctgataaagcttgcgcaatctgatttagttgcttttcatccaaactaaaaaacaaatgcttcaaatattgcgaaaaatctgttggcactttttgcttttcttccgcagttaaccacgattccattttgaaggaatgcacctgatattgcatccccgcttcgtctaaatatagctgaccatattcctgcttagtcatacaaaaacaagctcctgctacctccgcaattggtcgattagcaaacggaccaataatattctgtgcgtgcatatggccagaaaagactgcttttacattatatttttgtaataaaccttgcagtgcaagtgcattatcaagaatatatccctgatagattactttattatggcgatacagattatgatgcataaagaatagcacttgttgctgcttttgctgcgcatcaattaattctttttcaatccagttcatttgagattctgaaattcgaccgttagtaatcagatgagtttgtgattcctgcttgccataaatatttgagtcagccaatattagtcgatactgcttattcagattaacgctataagccagtgaatcaggatcttcatgtaaagcataatgataagaatcagcaaagatctctttccaaatagctgggctaatttgcggggtgtaatcttcatgatcacctttaaacttgcgagcccagccgtcaaaaatatcatgatttcctggtaaaactaagaatgcaattttatttttagttaatggcttaaaaatattagctaaacgttctcctgatattttagcgccattaaaggttacatcaccagtaattatcactgcagtgggcttctcttggattactttacgtacaaacgcggtcaaagcaatctcctgataatctaagtctttacctgcactagtgttgcgcatatgctgaaaagcaagaccatcatcatgtaaactatctgcaattagatgtgtatctgataataaccaaagaattggcttctttttactagtaatcacaatttacctttttcaaaaatctattttcactttaactactcatcattataccaacaaaaaaggcatccctgctagggatgcctcattgcgataaaatattgaattaagcgtcgatttcttcgatcttaatgttaactacgaatgcttcaggagtatcagtgcctgaaacgatcttcttagcgtaatcgtcgccttcatgaatttcagcatgtcctaaaacacgaaatgccttatgagtaggaacatcagcgacaacaatagctgctactgaaccattcttcaagtttgcataagcagttgacttagtcttttcaagatattgaatagttgaagcatcaattgccttaagtgaagccttaggaccaacttgtggcacaccgttagcattcacagttgccatgtatggtaagtgtgagttaaaaaattcaatttgttcatcagtaagcttagtagtatctaattttttcataaaattcgacctttcttttcttaagttcattattaattataagatatttgctataaaatagctattattttgccttagcttaattgattcttacatttatcatacacaagatattgtatttaataaaatgtgtttttaattaaatttctcttgctactaatatttttattaagtaaacagtcgttgatatatcaatgcttataaatgctggcaaaaagtcaaggattgaattttattttttagccagtagtatattatcttgcattagttaataagtgatacaagatattgtgcttattaaaataaaaatatattttaaatttcatttttattaatgttatttttagtgaggagaattcgatgacaaagaaaggcttaacaaaatatttatcaattggtgcagtaactactgcagcattatttttagcagcttgttcaaatcaaaagagcactacatctgctaaaaatagtaagacagaaattactatgtggcacgcaatgaatggtgcacaacaaaaaactttgaaacaattgactaataaatttgaaaaagaaaatcctaacatcaaagttaagctagaaaatcaaggtaattaccctcagttacaagggaaaattacttctactcaacaaaatcctaataacttaccaacaatgactcaagcttatcctggttggctttatcaagctgcgcaaaataagatgttggtcaatttgactccatacattaataattcaacttatggttggggctcagtagccaaatctaatattcgtcctgaattaatgaagggtgcgcaaattaatggcgttcaatatggtattcccttcaacaaatctattgaagtcttgacttataacaagaccttacttaagaaatatggtttaaaggtacctaaaacaatggcagaacttaagtctgtttctaaagcaatttatgaaaagtccaaccataaaattgttggtgctggttttgataacttagccaactactatgttctaggtctcaagaatgaaggacaaacttttggtcgttcaatcaagttagattcggctgcctctaagaaaattattaacttctacgcagatggcgtacgcaatggctactttagaactgctggtagtgaacgttacctctccggtcctttttctaatgaaaaagtcgcaatgtacatcggtacttcagctggtgaaagctacactaagatgggtgtaggcaacaagtttacgtacggcgttgctcctcgtcccggtgaatacactatttctcaagggactgatctttatgtctttaaccatgcttcaaaagcacaaaaaaatgctgccatgaaatatatgaagtttttgactagcaaatctagccaattaacttgggctaatgagactggctatattcctgttaacgataatgtcttaaatagtaaggaatacttagacagcaagatgaaattgccaagtgtcttaaaggattcaatgaagcatctctacagtgttcctgtagctaagaattctgactctgcttataatggtatgaatcaaattatggaaaatattttaattgctgcaaataagcatcaaaatgttaatgctcaaattaaggctggtcaacaaaaattagatagcgcttggcgtcaataatgatattaaaaaagcatccctcttctctattttgattagggatgcttttttgcatttgcaagagttgaatttaatttaagcactcacatagagtgcgacgtgcaaagaacctacttttgactggggcaaatgtatttcatccaatcctaaatatttggcttcatcaactattatactatgtcaaaagtatataaagaagagttaacacataaaatacaaaacaaaatcagtgcgaaactccctcatttttatgttcacatagggttcgcactgatttttttcttaactcaaatctttcttagtaactgccaaatgtgccttatcattgataaagacccagattggcaaatctattcctgttgaatcagtcaaattatttacaatttcactgataaaaagctggaccattttcttaggcggttcagtaaagtctcttctttgcggcgtgtaccataaacctgtgattggctttttagtttgtcgatcgaaaatacaattcagggtttcatcatattgatcaaatgaggccttgtagactatatgtaatggatgatgtgccaagttctcgactaactgataacgcatatcgtccgcaatttttcctttactaatcatcattaaactggtaactggaccattttctttttcaaatttttgcaacttgccttgtttgattagcttcttttcaactgaaataaaactatcagaatcaactaacatcgtttttccttctcgtattatataaattaaatcagtgataatgattattcttttagtttgtttattcgatcatcagatgctagtctctaattgtcattgaccttggtcaattggtataggttgtttccttctgtagctttgactacttttttagtctgccgcccaagcagttttactaatgacttactcacatgctgtatcgattctggctattactgattcagagcagattcagtcgcagctttttagcttgaacctatgaatacttatattttgcgagattgtcttagaatctgtaattagggactaacatgtgatgatcgatctatgaccaaatatttgctagaaaggaggccattctcaatgaaactttttatcggaattgacgttagttcaaaagatcttcaagtcgctattactgactcagaaaattatcaaaaacctttacttaaccaatctttttctaatgacctgattggtgctaatgaggtcaaaaagataattcttcaacttgctaaacagaacagctatgacaaagtaattatcggcatggaagccacttcaatctatagctttcaccctgcttatttctttgccaatgacgaagatttacaaaaaattaatcttgaaactgatgtcattaatcctaaaaacactaaacgatttcatgacgtttacgaagaaaataagaatgatcctactgatgcctattacatcgctgaatacttacgctttggtaaataccatgtcactattgctcggcaagaggaatacttagctttacagcgtttaactagagctagatatgaaatcacatcttcgctcactagagctaagcagcacttcattgaaactctttattatcgtgtaaacaaactagttaccgttgacaaagacaatattaaaacttctatctttggcgcaacgatgctgtcaattgttactgatagtaaaaccatcgatgaaatcgctgaaatgccaatcgaggatctaattgactaccttcaaaccaaaggacgtggccgcttctctgatccagagactttagctaaagcgatcagaaaagccgttagaggatcatatcgcttaggtaaagtcatgaaagactcgattgatgccgtattatctgtttactatgccgaaattaaaactaatcagaaattgattaagaacttagataaagcaattacagatatcgtccaaacgcttcctgaagagagaatactacaatctattccaggaattgggtcagtttattccgctggtattatcgctgaaatcggcagtattgatcgctttgacactgaagcacagctagctaaatacgctggtctagcttggcgtcaaaagcaatctagtaattttgatagcgaacacaaaccgatgactaaaaacggaaatcattatctaagatattatttggttgaagctgccaacctgattagacaaagagatcccgtttttcggaagtactatcaaaagaaatacgatgaagctttctattctccgcataaacgcgcttgcgttctttgtgcaagaaaattaaccaggaccattttcactctgctcaaaaatggtcaaatctatcaaacaccgaggtgattaattggtctaaaacatttttggaggagtaaataatagttgttaaaaaatcccttgaaatagggcttagtttcatgcacgcaaattttggttttaaaacaaactaattaaaaataaaatttaacttttacattgacttattaccacatgactctctactatctattataagcaagctgtcaattactttacataattttaattattatgcaaaaaaagaagccatgacctgaaaatcatgacttctcgcgaattcctcgtccgtaaatcgaaatcttcacgaacatttttaccttaacacaattaattatactagtctaattaattttaattactaaagcttcatatggcttcaatgagatattctctcctagtttgccatcttgtgcagaataattgctcaatacgagttgataattcttattttgatattgttcaggcaatggtgctacatgatcagtaccatagaaattagtgaaaactaatatttttttagcttcatctttcaaaaaacgttcataggcaaaaatttgtggatcatcttttaaaaacattctaatatggccatcagaaatcagttgttcgtgcttacgcaacttgatcaatttttgatagtaagcaaaaatttcaccctcgtgtaattctttttcaacattaattctatcttgatctgttggtaaaagccatggctttgattcactaaagccagcaaatttactatcatcccagtgcatcggcacacgagagttatctcgtgctttagtttttactattgcaaatgcttcatcatcgcttattcccttttgtttcaatgccgcaaaagcatttttagcttcaacatctacataatcatgaattgaagaataatgtggatccatcattcctatttcttcgcccatataaatgtaaggagttccgcgcatacaatgtatcgcagtagcaagcatttcggaagatttctctcgatatttaccagtatcaccaaaacggttaagggcccacggctggtcatgattgttccagaacaaagcattccaaccgccaccttgatccattttttcttgccattcagtaaataagtgctttaatttcatgaaatcaaacggctctttagaccacttttcaccatttttataatcgacttttaaatgatggaaagtaaagaccatggacaattcatgctcactcggcttagagtactcaatcgaattagcaatagtagttgaagacatttcacccaccgtaattgagtcaggatcttgaccaaaagtagagcgattcatttctttcaaatattgatgcagctatgaaaaacatatgcaaacaactacattgtatttatttgtagtcattatggcttaacatgcctatgcttttcttatcaacgtcttcatcagttttccgatattccaacttgggagtaatcgcattgaccgactcttttgacttctttttcggacgtagcttcgcccgcattctttttataaggctttatttaattctggatgttttaccagaattattaagttgagcatggcgttttcgtcacggtcaacttttttattatagttacggcagttcggattataacaaacaaattcattatgcttggtgccatgcttcttattgcctcttaaagtgattttttcatcgccttttttcactaatccgcaggctgcgcacctttgagttgaagggtacagtttattggctacgatcaatttcttgccataccattcgcatttataagtcaatatctgtctaaatctgccaaacattgacctgtgcattcctttggaggcaacatgactcataagcattcctttaacgcttaggtcttcaatcacaatagaatcatattcgctaaccagctttgtggtaaatttctgcatcaaatcattttgaatatttttagcacgagcgtaagctgcttgaagcttgtttctcgctttcatgtagcgcttgctttgcattcctttgattttaccattgacgacacgctttttagacagctgtctttgataatgcttgattttgcaatagactgctgctaacgatttgggcattactatgcattgaccgtctctgtaattgaaatgtccaacattgatatccacgcctgtatatctgcctgtcttaggcttgtcttctggatcagatattttaaaaggaatggatgcatagtatctgtttttttctttgtaaaagctgattgttccgaaatcatccgacaatggagcagagcttaatttaaagccgttccatgtttctttgacagccctaggcttttctaaaaataagcagccatccttaattttggcctgatccattttaaatccctgcctaggtgcttttttagacttgaattttggctttccccagcctggctgcgctttatcaaaaaaattctgccaagcattgcctaagtcttggatcgccaaattaaagacatgagctggaagctttgtctgccagtattgcttgttttcagtcagctcatcacgaattctgcgccaggaagggacaggattgtttgcgagaatttctctttcagcgtttgtaggcttttgtttttttctaggctttttaagttctgctttaagatgctgggttaaagccaattgtctggcttcatgcatattttgccaggtttctaaaccgagattccagctgaagcgtctgtaatcacaaagcgaatcaagaaccttcttcatcctttgattgggttttaatcgatatgttctggttttgatgatcactcttttcaccttccttctttaaatcccgcctaatcttcctgccgtaccgtctcaacccataaagccgacatgaaaacacatgaattactgaaattaagtcttcaaccatttcctcatctggagaggtttcagggttgtttaaaacaataattttagtatcgtgcttagcacaaaaatgttcaaaccaatcaaagccaaagcgggcaaaacgatctttataggtaacaaagattcgttctatttttcctgcttctacttcatccaataatttattccattttttgcggttataattaagccctgatccaatatcttctacatgttcatcaataatgatgcctctagcattggcatattcaatgatgaaagccatctgatgcctaagattttctttctgacctacagaagaaacacgggcataagcaactgtcttgcggtgaggcttaatgcccctaaaagcatccagccgctcttgcgtatagtatctgcgattggcaacattgcgctgagcaactagtcttttttctcgatcccatctttgcatggtagagcgagatacaccgagaagcttagcagcttcgccaactttataaattcttgacataaaaatagacctgctttctttgcaggtcaattatatcattaataggcatatttagatatattaaatacataatttactacttgtgattaacactactgctgtatcagtataaagactcttttcctgacttggatcaccagttgaatcaactaacttttcatccttaccggtcacgttaattacgtcaaaacggaaaccatgtactccctttgaacgccagaagttaattactttgaacaattcttgacgaacttctgggttatgccaatcgagatctgcttgagttggatcatataaatgtaggtaataataatccgtatcaccaaattttgcccaagctggtccaccaaacttactttgccaattattaggcaaggagccgtcaggcttagcttttcttaagtaaaagaatttgcggtacttttcgtctcctgccaaagcttttttaaaccatatattttcggttgaacaatggtttagcaccatatccaacatgacgccaacgcctatttcttttagctttttagttaattcctcaaagtcagacattgtgccaaagcgaggatcaattcggtaataatccgcaatgtcataaccgccatcattctgaggggatacaaaaaagggattaaaccagatcatatcaacgttaagcttcttgatgtaatcgattttagcgatgatccctggaatatcacctactccatcgccattagaatcataaaaagatttgggataaatttggtaaattacttttttgcctaaatctgtcatttttatctcctataacttaattttctgtctacgagcaaagtcaataaatttaaactttttaggattatgaaaggataaagttaactgaaacagcgttgtatctgctaaaaaattatgactagctactagtactgcttccttactatccaattgcaatttctcttgtaaatcagcatcgatttcttctaccgtaattgccttagttgcataggatatatctagccctaatttattttctaaataattgtagattgatttttctgcttcttctggcggcagctcagtaattggtggattaaataagaaatcacagtccagcacttctggttcatcgttaatcattcttaaacgttcaacatagatcccagcatgcttcttttgttcagggaagaatttcttgaaaattgccggcaaatcatcaaccatttcatcattaagtagcttagtttttgcattcattcctaatgatttatttaattccgcaaagctagaaattcctgaaataggaaacgaaaacttttccaaattaaggacaatcgaacctttgcccttgattttttggattaatcctaacgaggtcaattgctgcaaagctttacggactgtttcgcgtgacgcgccataaagctctgtcaattgattttcactaggcaagcgctcgccttccttaaattgttgatgtttaatcttagaagctaagtcttgagcgatcagttcagattttgctttagtcatcttgaccttgtcctttcttaaaatcatgttcattatatttttgatgtacgtacatgtcaatagatatatctaaaaactatattgcaggcatgtaatcattttcataaaaatctattgacaacttgtacgtacaggaatattataataaatgaattttgtgaaaacgcttttataggaaaggaagaataacacttatgaataaaaacgaaattgcattacttgctcctgctaatggtcaagtcattgcactaagtaaaacaagtgatcctatctttagcaaaggaactatgggtgatggttttggtttaacaccaactgataatacagttcttgcaccagttagcggcactatctcaatgattgctgaaacaaagcatgcgatcggaattactactaaagatggtctagaagtattggtccacatgggagttgatacggttggacttaaaggtgaaccgtttgatgtagtaattaaaaatggtcaggaagttaaagctggtgaccaaattgccacgatgaatatagagatgattaaagcaaaagatcttgatactacgattatgactttaatcaccaattcatctatgaaacttgatggcttagatgtaactgaaggtaaagcagaagctggcgatacagttgctcgagcttatttaaaggagtcaaaagaagatagttcagacaagaaactttcgtatgatgaattagctactttcattattaagaatgttggtggtaaagataatataaataacctgattcactgtatcacacgtttgcgcttttatttgaaagatgagtctaaagccaatgatgatattttaaaaaatcaacgtggcatacttgacgttatgcatgctggtggtcaatatcaagtcgtaatcggtaatgaggttaccaatgtttacgatgcagttatgaaacaattgcctggtcttagtgacaatccttcaccttaaactaataatcaggatgatggtaaaaatcctgtttctagagcctttagtaatctaattggttttattaccggctcaatgagtcctgtaatcggtgttattgcagcatcgggtatcatcaaaggcttacttgcactactcacccttccacaacttggtgctttacttagcgtcaagagtccggtctatgtcacagttagtgctatggccgactctgctttcttctttctaccagttctagtaggatttgcagccgctaagcggttaggatccgatccaatgattgctgcagtaattggcggtttcttagtttatccacaaatgattacttggggcaagagtatgacgacaatgtttagtcttggatcttggaacttccaattcttaaactattcctactctatctttccaatgattttagctgcttggctagctaaagaatgtgaacagtggttaaagaaagttttgcctagttacttgcaaatgatctttaccccattaattactatccttgtagtttcaactatcacattagttattaccggtccaatcattcaaggagccgcaaatggtatcgcagtctttattaactggctagtatctgcatctggctgggttggcggcttaataatcggtgccttttatcagttattggttatttttggtcttcactggggcgttgtgccactagttgctcaacaaattgcctcaactggtcaaagctcattaaacgcaattatctgcgcaacaatggtttcccaaggtgcagctgttcttgcagtcgcaatcaaatcaaagaaagcagacatgaaagagctaggaattgcagcagctatttcagccttctgcggtgttactgaacccgctatttatgggattaacttaagatataagaaggtctttgcttcaggttgtattggctcagccttcggtggcctagttactggtttaatgcatggtactatgtatggctttaccggtggtctaattggcttctcaagctttttcaacccggcccatcctactcaactaaatagtttctatactttcctaattgccagtgctgtttcaattatagtttcatttattgcagtttgggtatggggatataatgacaacatgactatgggtaaaaaagtagccaagaagcaacgcccaggttcagctaaataaaaatttagagcaaaataaaacgatgaatcacccacaaaggtaaattcatcgttttttgtcttatttaagcagcatcagcaatccgttgtgcctcaattaattcagcttttctgatatcacgaggcaagaactgacgaatatcttcttcattatagcccacttgcatccgatggtcgtctgcaataataggtctctttaataatcctggattctgagtaattaaatcaaccattttagacaatgacaagtcttcattcaacttattctttaattgtttgaaagactgtgaacgagtagataaaatatcctcagttccattttcagttaaagacaacagatgaaggacatcttctttagataattccttaaagacgttcttttcattgaaagaaagatgatatttgttaagccatgctctcgccttacgtgaagatgcactacttgttgacatataaagagtaatcatacaatacgcctctttctaaaaaactcgttaacttctcgtacattagttctattgtataacttactttttgatagtgcaagctatttttacaaaaaaattgttgaaaatagtatacttaccttactgaaagaaggaatttgatgaattttaaaacaccaattgccgaacaaatgaggccgcaaacactggcggatatggtaggccaaagtgagttgctgggaccaggaaaggctttaagaaatattatcaagcagcatgttaatatttctttacttctctgggggcctcctggtaccggaaagacaagcttagctcaaattattgctaaagagaatgattatccctttgcttcctttaatgcttcaattgataataaagcacagttgaacaacattattaatgcttataagtatcagaccttcgttcttttaattgatgaaatccaccgtatgaccaaaaatctacaagattttttattaccttatttagaaaatggtcacgttctacttgttggctctaccactgaaaatccaattatgtcgattgtgccagctgtgcggtcacgttgtcaaatctttgagttcaatcctctaacagaagacgatattgcagctgttttgaacaaggcatgtactaaggtccttaaattagtagatcaccaagttgaaaaaaattcgttaaatttgatagcagccgcagctgatggcgacctacgaattgctttaaacattttagagactgttcatgcacttaatcctaaaaagatcaccttagcaaatgttaaatcgtttactaagcagcaattctttagctatgataagaaagccactaaacattacgattatttagctgcatattctgactctatggctggctctgacacagatgctgcactttattatcttgctattttgctaaaaaatggagatttagcttcggttgtacggcgtctgcgtgagattccatatacttatattggcttagctaatccgcaacaagtaactcaaattgttactgcagctaatcaagctgaaaagataggaatgcctaaagctaaatatccactaatgtttgcaacaatgttaatgtgtatttcgccaaaatcaggagcatttgaggaaatttgggaaagacttgatcaagatagtgatcatcccaatcggtatcccatgcctaatagtttgcgtgactttcattataaacacgctaaagaaatcacgggagctggcctagctgagtcaccttttcaagctccgcatcaaatcgccaagcaaaattatatgcccaagggactcaaaggcaaacaatattattttccaaaagacaatcaaaatgaacgcagattatatgagcaatacctaaaattacatcgttatatttacggcgaagattatcaaaaataaaggacagcaatgcaattgagcatccctgtcctttttggttagattataaatgaagaaaattggtttattaattgcttctacgagagaagattctcgtccagccacctatatggtagttctatttaagttatttgttaaatgctaatcgaaaaaactttacgtactttttacgtattttattaccaataataacaaaaaagcagcggcgcaaatacagcgtcactgcaatatgtagcaagattatcaatgaagaaaatggtatttatcacttctaaggaggaaggatatttcatctagccacttatatcctaatgctacagtattaatttgttaaataaaacggctattaaatctaccaatatttttctagtggcttttcattcctaccagtgcgagtttgacgcaaatgttcagtcacaatattagtcaacacttcggctaatttatcaatctgctcaacagtcacatattcatatcggccatgataattgccaccaccattaaataagttaggtgtaggaattcctttaggcgaaataaagtttccatcagttccacctctaaaggattgtacatttggctttagtccagacttgcgataagcatcaagagccagatttacaatatatggcttgtccttaatatagttgtagatattttcatattgctcacgaatatttacagtaaatctattgccatactttttgttcatctttttaactatatcgcgaataaactgttctttacggttatattcactttgatcaaaatcacgaataatcatgctaatatcggcatgatcaacattgctttgagcatgtagaaccaagaaataaccatcatgattacgtgacttttcaggcacttgatcctgaggtaaattagacaaaaaatcattcatcaaagttgttgcgttaaccatcagaccatatgcttcaccggggtgaactacagtccctttaatatggatcgtaacctctgacgcattaaaggtatcgtattcaaaatctcctggccgcccattgtctaacgtataagcgaattctacattaggaaaatcagctggatcaaaatattgaccaccacagccaatttcttcgtctggaccaaaagcaacaaaaacatcaccgtgttcaatttcaggatgttcagttaaatatttaagcattgctaatgccccagtgattccagccttatcatcaactcctagcaaagtatgaccatcagaagtaattaaggtttgtccttttagatttaataagtctggaaactcagttggatcaagaacaatattatctttctcatctaggataattttctgaccatcataattttcgtgaatttgtggcttaatattaactgcgttaaagtctgcagtatccacgtgagcaaagaagccaataggcgttaccttttctgctgtgtttgcacttaactttccaattgcaaaagctgttttttcattatagtaagcatcaagcccaagctctttcatttcctttactagttccttggccagctcaacttggccaggtgaggaaggaatctgatcatgatgttcataatatgagcgagtattctttttagctaactgaataaaccgtttttcttcataatctaaattataaaaactcatatcatattccttcttacattaattccatcgtatcacttgaaactggctcagacttgggatctgaccaccacgactctttaactgttttgataattttaaaaccatgctttgcatacagcgctttagctgctatatttgcgctaaagacttctagcctaatcggccgtctaatatttggtaacactgaagctagcaattgatcaccaataccacgtcgttgaaattgaggatcaatataaaaataagctaaattatgtggcttatacgcagcaaagccagcaaattcattattaacttctacaatcctaatctcagaatcaaagaaattataccagtatggtgcttccttaaacggaataaaatatttctccactccgcctattttcatttcttgcaaacgagccgcatcatgaacccggcacaaatcttcgtaatctaaactttgaaaacatctagttcttacttgcataatttactcctttaggtgaaagagttaataaatttttatttttctttaattatacagaagtgaattatacatttaaagattttagttccaattcaaccagtcttcatcaaaaaactcaactttttcttcctgtgattctaatttctcttgttgcatcatagctattatcatctcatctttctatttttagaccattagttcgcatagaaattatatcaaacaaaggttcatctttctactctttttcaaaaaaatattaattgagttagtaatagatgtgaattacctatatttttatccacaatcgcgataatatcgggcttcagagccatgtttcacgtttattgtttacatttagctgtttttccaagtaatcaaatagcttttcactttataaaaattgtttcataaaaaaggatccaacttaatggatcccttaaacatgttattcgtaaataattacaggttcgccctttttaatattgttccaaacgcttcgaatctcacttggtttaacattaacacaaccatgtgagccaccctttaggtaagcggtcttgctccaatcagtccgccaagaggcatcgtgaaaaccacagccacttaaggtaaatggcatccaatacttaactggagaagcataacttgaaccatcatcattggtcccacgcaatgtacttggtgattccttatagtggatataccacaccccacgcggagtttgatcacccttagaaccttccatagtaccggtaacaacatcacgaagatgaacggctagtttaccctttttgatcaaccatacttcttgctttttcaatgatacaacagcataagtatcaccaatctctttatttgaataaccatagccgtgaggataagtgctgtagcctaaaccgtaaagtgcatctgcaccatcaaaatttttttggcctttggcaaatgcttcgagaagtaagcgttgcgtctttttaacataaacgccccaaccccaagtcttattctttaccgttatggttttgcctttaactttattgccctttggcactgtaaatttatagctcttgtgtaatgttgaaacttctttatcaatttgatttaacttagtcgttaatttactagtatcaccaaattgatagcgattatctcgataagtcacattattcaataaatctttggcctttaattgatagtttttgccattaattttataagtaatctctgctttgcttaagtcagttagtttctttttagctgtagctaaattactagtagtaaacttataagtctgagtcgatggaattttagtttgttgcttcttaaaaaaggcctttgtctcggactcatctaatgattggactgtagtgttatagctataaaccagtttgttattttttaactcaacttgatttttagctttttggttaactttagccattgccttagtaacggttagctttcctactttaactccatcgattgtaacattagggttaaagtgagttttagcatatttttctgctgcagcttgtgttgccacacggtgattatgaatgccaaaacccgcgattactccaacgataattaaaactgcaatcgttaaaataataatattgtttcgtttattctttttctttaggtcttcgttcatactatcctaccttttatgccagtaataatatctttaatatagcaccttgcaaatttcgtgtaaaatctattgatttatctaaccttttttataattagacgactagcatcccgcaaagcaaaatataaaattggtgtacaaattgcagtagaaattgaattgattacagttgcaggcaaactaacaaaggctccaactaacgctactttaaagctcgtccccaccattaaagcttcaacaattgaaacgcaataagtagtgaatatcttagttacccctgcaataatacctaaaataataatatttcttttactatcttgatagtgcattcctcgataaactgctgtcaaaaccgaagccactactactacctcaagcatagttaaccatgatgttgcggcatagccatttaacaaatcaaaaccacctagaccaataattcccgcaatcataccattacgataacctaaatataaaattgctacagcagttagcgtatttccaaaatgaataaatgggcgtcctaccatagcaggaacggggattcttaacacctagatcccaatataaataattgccgcaaaaagtcccgttaaaactaaagcttgtaaagaattcttgttttctctaaatatctgcattattaattattactccatctcttcagtaaatctggtaaagctgctgcataatttggtcctagacgtgaatcttgcttgggtgtttccctgattgcttgtgcaacaaaatcggccgcaattgaacacgctttttctaaattttctttatgcattaaagcagcaaaaaatgcacttgcaaacaaatctcccgtaccaaaataattacctgggagttttttctgaattaaagaccaactatgatcggctgtaattccaacttccgcaattttttccttattaagtgaaataccggtaattatgacattcgagacaccaaattgactagataattcagccgcaaattctgttgctgttttcaatgaattactagttgcctttttgcctaataaaaatgctgcttctgtcatattcggcgttaaaatcgtagccgacttaactagatttcgcatctttattacatagttttcatcaatgccacgataaagttgaccgtgatcacccattactggatcaatcaagatcaatttatttttttgtttaaaatagctaatcttttctgtccaaaaatctaatgctcttttgcccaaatagcctaagtatacagctgaaaaatcaaaaccaaccttttgccaatgggccataatcttagccatttcattattcaaacttaaaaaagtattctcaccaaagccacccgtatgtgtagacaaaattgcagtaggcaatacggtcgggctcaagccacatgctcctaaaacgggtaaagctgcactaagtgatacttgaccagcacaagataaatcttggctaactaatacgccaccattaaccatcttttttactccaatcaaaaaaaccctgctttaagcttaacatgaagtttaaagcatgaaaaattttattttgcgctaaatgtattagccttgatatgattcaaaatttgataaccaatttgtttatttctgttttcatcattttgagtttgatttaagaacataatcaaaccattttgattatctgtagtcatctgaatccagttaccaaagtgagtattatataagttaccatatgctaacttcaagttatcattattcttcatatataaaccacctgaataaccatttgatgaacgtgatgttaaatgagtcatataatcaaagtctgttcgactcaaaatttgcccattggttaaaccaagttgaatacggtaatagtccattggagctgagaacaaattaccagcacctaccaattgagaagcttgagtctttttaacatattgagcccattggtaattcttttgattccaggtatatgagataccatccgtcatcccggctggaatatcttccaagaaataagttcgctttaagccaagcttattaataattcgttcctgcacattttgcttgtagctttgtccagtttcttgacgtataattccagctaacaaaatatagttggtattattgtatgaaaaattaccaggttgattttgcgtagttgagtttagcttattaacaacccaattaattgcatcagcttctgaataaacacgtcctctatttacttcagtatcagctgctgtcaatccagaagtatgcgtcatcaagttgccgacggtaatattatcagcaccttttaaattaggataccacttagagatcttagtatactgtgtaaacttccctgcagaaattaattgagtgataattgcgccggtaattactttttgcaaagaacaaacaggataaactaccttactgtttcccgcacctaatcgcttgccataataaccataaccataagaaatttgttgtggttgtccatcttttactataactacggtaccacgagcataataactagctaatgtatttctaacaaagctccgcatttcagttttgttataacttgctgcctgaactgtcgagctattggcattagcaattgccattccaacaggcattgaagcagctatagttaaccaaatggttgatttgattaatgttttttttaaattaatacgtttcgttttaaattcccccagcaatgttatgtaaattctacccataatattagcatttatttttttcattggggttacaattttgataaagaatcaatgagaacgtatacattttctttttctaatatggataattatttaaatgatcttgatcagtaatctgacgtattactttagccggtacccctagtgccaatgaattatctggaatatctttagtaactaccgatccagctccaataacgcaatttttaccaatttttacgccgggacaaacagtaacattgctggctaaccaacaattatcgccaacagtgatagctgctccatattcaatatcggctatttttccgtctgattgcttgcgagcatttctttgagttggcaacaaaggatgcaatggagtcgcaaatgttacgttaggtccacacattacattatttccaattgttacgggacaagtatccaaaatagtcaaattgaaattagaataaaaattatctcctaagtgtgtaaattggccataatccacttcaattggtccttgtaaatatacattttgaccatgattcggaaaaagacgatcgataattgctttccgttctacctcatcttcatcagtagtcatgttgtaatcacgtgataagcgatgagctaaactggaaatctttttcagttcttcagtatctgggcgatatggtttacctgccaacatttttttagtattttcttccatcgataaagcctactttctaatttaatcgcttacttaaataaatcatgtctactagctgatgtccagcttcaaaaatcggatgatcataattttttacaaaaaaatctttgatcttacctgagcgtttaaaaccacatttttcataaaaaggaatagttaaggggctatcacccgttccaacttgcaaaatttgatatttattttgatacttcttagcaataaaattaatcaaatgtttagcataccctttaccttgatcttctggataagtggctatattttttatttctactgtattaccattttcaaccgtaataacacattcagatctaacttttcctttatcaatcaagatatacataattccacgttctaaatagcgatcaatcatactctcttgttcatcagctaacaaaagtaagtctatatactgcttcttattagattttatctctttaatttccatgattattttccaattaatttaaaattttcgtaaattgcaataataacttgaacacttttgtttaggctgtttgatagatgcgatctaattctctttcaaagatctcatctggtgtatgataagccaagatctttcttggcaatgaattgcaccaagtttcaatattaatgatttgttggagagagtagttatgaatatagtcacctttaggaatgaatctgcgaataaggccattatgcctctctacagtgcctttatcacaagaagtatatggatgagcataataaactagtgatttggaaatatcttccagctgagatagatccgcaaattcagaaccattatcagtcgtaatagttttaaagatatcgttccaatgctcgctgtattgcttgcgcagacttttaaaggcattcattacactggcagctgttttatctgggattttaataattaggaactcacggctcatgcgttcagacaaagttagcagcacttcgtcgtccttggtcttatggcctaaaacaagatcacattcccaatgcccaaacacatcacgcttattaacttcctgtggtcgttgttcaatactgcggcctagcttcttcttatttttacgaatgcgatgaattttggtattgcgcttgagtttctctggcaaatcatagttatggatgtttaacaagccttgatcgacataattataaagcgtcctagtgcagacaatatcgttgctggtaaattcccctacagcagtgcagcgattactgcaggcgtcgagcgaccagccatcttcaaaaaagtgctgttggacgtaatcaataaacttatgcttcttaagaaaatccgatttgcgtccacagtatcgacgattgttttgataaacactctgaccttgttgggctttataacgtttaactttaccgtgatacagcttaacagcccctcgtttgatctcatagtgaattgtactaggggaacagccaatttctcgagcgatggaacgcaaagaacaatgatctttcaaacgagtttgaataataacccgctcttcaagcgatagatgtgttccttttttacgcttgtccatgatagaatgtagtgagtccattttgacctccatagatgtttttgtggttattaacattctatcaaacaggtccaaatggacttttttattttgtatcaagtgttcaatttaattttacaatcggcaaatttaaaatttttctctttctactcatattctatgataaactcattattgttataaaaataagtataaacgaggaaaaaatgcgcaaaaaaaatatttattctatttgtatcggattaccgatctttttgattcttgcattctctattatggctcatgcaagttgggttaccggctttgacaatttctttgaaggcttagtccacagtattcctaatctgcagagcattatgcatgtaattacatttttagcagatactaaagttgacttagtttggatgctgttgatagctgtcattctttggctgaaaaagcagcgtcctctttcggcaagtattgtcatttcactagttacagctgatgcttttggttggattgttaaacatataatccaacgggcacgaccaactgctcacttagctgctgatgatggcttcagttttcctagtggccacacattaggaatggcgattattgttttctggctaatactaatattgattccagctttagttaaaaataaaactgctaaaatctggctcactgttttattagctatttggcttgttttagtaatgatttcaagagtttatctctacgctcactggccaagtgatgtttgcggctcagttgctatgggcttaatgtggattggcttagtagatgcaatttgggataaagttactccacaaacagacaaaaataatttttaagattaaaaatagtcgacgataagtcggctatttattttgggcaaaaagaaaaagtcactaaggaaaatgtccttaatggcttttctacaccttcaaatttcttcctatcagcagatgtcataagaaacatcttgcttagccttttcatcctcggagcgctcatcacacgctccgctactatgatatcaaataaaaataaaaagataaagatttttacttgataaatttcaaaaaaagtatatgaattattaaaaatcaaatttgtatattgctatcatttttaaccttttttagctccgatttaactgatttgcttttagcattgttaattgtcttaaaaaaggcggaaatttggccaatttctttttcggtagtcgaacaacagccacctattattctagcaccatgttcataccactcttggcttaactttttaaaatcgaattttgcattaaatggaatccaattgcgctcaaattcgttataaacgccacccaagttaggataaatgacaatttgtttatcagtaaaatcatgaattttatcaattactgcagttgctaaaaacggtttaaagcaattggctccaatcgcaaatacttgatcatattcattaagcttttgcactacccgctttaaaggagtgccatcactaattttagttgtatcatgcaatgtaaaacttacatacactggaatttccggagcattttcctttaaccaatctaagattgctacaacttcatccaatttaggctgagtttcaagtgcgagacaatcaggtttatttgccaataaaatcttcaatcgtggtaaatgaaaattaagatattcctccgttgttagagaataatctccgcgaaattcatccccttgagctaaatatgcaccataaggtcctactgaagccgctacataattatgaattcccgttgtctttgcaaaatcatcacgggcttttttggcaatttgaactgcattagtaatcaatttagtagcctggtcttgtgtaaaaccatgtttttcaaaagctgggatatttgcttgataagtatcagtaattgccatctgggctccagccttaaaataattcatatgtacttgataaatttgagcaagattatgttctaatgcaattgctgtccaaagttcattatttgtatcaatgcctaacttctcaagagctgtagacattgcaccatctaagattaatcctcgatcacggatctgtttgagcaaattcatttttctcaccttagtataaattgagtagatagttaatatatatttaatattgcattaatcttagatctgtttcaaatattatttcttcctatgtcttattttttagctacagtttgctataaatttatttaatgctattttcatataatattaaaatagatttttgaaatcatgtaaataattggccaaatagtgtgccgttaaactttcaggcttttgctttaattctaaaggcttaccctcttggacaatccgaccaccgtttttaccaccatgtgggcctaaatcaatcatgtaatcacaattgacaattaaatttaaatcatgagtgattgtaataatggtagctccctgatctaacaacttttgcattacttggaccagaaccttcacgtcaagaggatgcaagccaatcgtaggttcatcgaaaacaaacaatgcatcattttgtttatgactaagatgagtaacaagtttaaggcgctgagcttctccacctgacaaagttggtgtatcttctcccaaatgtaagtaatccaagcctacttcttttaacaattttagctctcgttcaatcttaggcactttaacaaaaatcggtagagcctcattaacatctagatttaggacatcaacaattgacagatcatgccacttcaccttttgtacatcttgattataacgatcgccatgacaggttgaacagacttgttgcatatctggtaaaaattggatgtcaagagtcacaattcctgtaccaccacaagtaggacaagctccttgtttattattatatgaaaaccaacttgatgtataatgcttctttttagcgagtggctgactagcatataactttcgtaaattgtccataattgaagtataagttgctacagttgaccgagtacttttaccaattggagatgcatcaacacttactacatttgaaattgggctagaaaatctactaatttgttttggcaatttttcactttggctttttgctataatagcgggtactaaactatccagaatcaaactagttttaccggcacctgaaaaaccagttactgcagttaattggtttagtgggattttagtttttacatcatgtaaattaaaatattgctttacttcaaataaaatagaatcggaatttattcgagtggctggctctctggcaagtagtttagcactaccatccaaatatggtcgaattaaagaatgttgatcatgtttgattgcagtaattgaaccttgatccaaaatctgaccaccttttttacctgaacctggaccaatctcaattacctcatcagcggctttaataatgtcaacattatgatcaacaactactaatgaattgccctgagcaactaactttcgtaaaaccttaattaatcctgcaacattagcaggatggagaccaatagaaggctcatccaaaacatataaaattccagtagtttcagtacgtaatgttcttgctaattgaattcgttgcaattcacctgtcgataaggtatttccacttctagccatagtcaaatagtctagccccaagtctaataatggttgcaaattatccaaaaactcctgaataatcgaatgagccattttatgcatattagttggtaaagttgcttgcacatctttaacccaggtaactaaatcacctaactgcatttcggccacctgattaatattttgcttaccgaccagctgttgtaacaattctggtttcaaacgactaccatgacaaagtggacaagtcgaataagtaaagaattcggctattcttttttgcgcacgttccgatttgctactctttgctgaacgatagacagcttgccgagcattttcatataaggcattaaaatcatgaaataccctgccagttcctgataaaaagtccattttatatttcttttcaggaccatttaagacaaaatctttttctttatcagtaagatctttataaggaatgtcgatcctaacaccagcatgttctgcaacgttaggcataaagttccgtcctggcaagctccaagatgcaactgcaccatctttaattgacaaattttcatccgtaatcagtttagattcatctagttgccgtatcttaccagttccgccacactcagtacatgcaccatctgaattaaaagcaaattgttcggcacttggtgcataaaattttacaccacagactggacaagttaattgtcccatttgctcacctgacatactcattgcctttgcaattgccaaacttggcttcaaatggtgtccattaggacaaactggagaacccaaacgagagaaaattaagcgtaaaacattaaaagtctcactcaaggttcctactgtagctcgctcatttggtacacttggacgctgccgtaaagctaatgcggagggaatatgtttgacgctagttacatcaacctgatttccctgtttaattcgcctacgcatataagttgacagagcatcaagatagcgtcttgaaccttcttcataaagaatccccattgctagtgatgattttcctgagcccgacagtcctgaaattgctacaaatttattcaaaggaatgtcaacgtcaatattctttaagttatgtactcgtccgccacgaacttcaattttcgttggaatcgtcattaaatatcccctttccattatttagtcattatctcttttaatctataatcatgaattaccaacaagcaaaccaatttttggaaaattatgacaaaattactattaaaaatatgtgttatatgatatattataagtagataaagtaagcgcttacttttgaaagacatagaaatgaggtgttgttgtgatattgattaaagaaaccgttgttttttcttttgatagatataaaaataccacatatttagagacacccatcaagctaggagtcatgcgtaacggcgcttgattcgtgtcctaaataaaaatgagggttacattttgtaactcttatttttgttcttaaaatacaaaagaaaatcagtacaaaacacggagtttgtactgatttttaatattctaaaggttaattatttaacccaatcgcggacttcactatcatcacgtgcaacaccaacaacattcagaccattagcccattctttaaagtgactgacataagccttatggttagtgcctgctgaggtaaagaatgatgcaacttcaccacggtagtttttcatcttttcaagtaatggcttaattggagttgcaggatagcctgaccaaacagggctaccgactaaaatcaaatcataattattaaaatcgatatcatccatttgaatttcaggataaggaaccttaccttgaatttgatctagagcaatatcgttggtcttgtacatatctgaatcaaaagcgtcaggagcaacagttacttcctttaattcgctgttttcaatttctccgttaatctttttagccatgttcttggtattgccttcccaagaataatagataattaatgtttttttagccataaatttagtccttctttcatttacatttattgtaataaaaaaagaccggtttgaccaatattttaatacgcgtggtgctagttaaatcgttttagttaataactgaaaattgaaagcaccaaaatcaagctcaagtcctgtcactattgagctttcttagacgtaattagtttttatatgatctgtttcagtgcaatttgtatgaatcgtggcagttggttaataaagtcattgattacttcatctatcttttcaaaactattctgtttaagctcttttaattctgaaattaagtagaccaatgcatctacgaatctaatatcaggtaaggattcgttcattagatagaataaatctccgattgtcttatcatctgtattttgtctttcctgccaggtcaatagatcataagttattgctgtaactgcgatatagccacattggccatcatagctttgaacttgagatttatctaaagcaagatattgcttagacgtcttaaaatatgtttcaatttgccatctacgaccataaagttggatgatttcttcagggctaagctttgtctgagtagtagctaaaaccaaatacttgttcttgtttccacggttggagacaaagacgagctttaataaaaagctatgtccatgatattgagcctcaactatgcttgaataaagataatgtttctttttacggatgtttgaagcagccaaacgatcatacaagtctttaacgctatagcggcaatggcgataaatgtaataaatctttgaactcttcttgatcatgccaagtccatctaaaccgatcttctttaaaatccaaaacattcttggagaagaaaaccaagaatcgaataagacgtatttagcttctactcctaatcgtaaggcttgtctaatcaactctacagttacatcattcatctttctctgagcttgatttctccttttaccagaaattgaacgttcatcagcagtaatgggagcagctccaatcatatttttcttggttttggttgacatcaaggcaaagttaaccggcaagaaggtattgccatcgctccagcctaaagttaaaccacgatatccgttcaaatactcatgcttgtcatggtcatagactttagctagcaattcggtctttttagaaaaagaccgagccatcagcgtatcgtcaacgataaaagcaagtcggcgtcttttatcgataaatggttttaagcagccaatgagccgggctgcaatcaagcataatagtttttgcagttgattcttccatcgttaagtacattgcgagcagttctaacggaaaaacgtttgtcatccttagctctgaataaagaaagccgagcaaaatgtactgacatcagccaagagataatcatggttaatgaaacggtggatttacgcttaaaattgacttgtttagttaacttagctagaccaattagattaataaatgaagaaattaaggatttagtatcgttttctgtgtcgatttgttctatactgttcattgcgcaggatctcctttactttttaggtcgacacttaaagtataacgcagagagatcctgcgtttttatttttgataagaaaaagccaagaggcgcggggaaagagcgttaatcttagctttcaagttttagttaataaaaaagtccaatcttgttagactcaacttgtataataatagaaaagagcctgatctgattgaactgccttaagcttaagcgttttagccaccatttacaagttagttttaaagatttagtgataatttgtcggcactggtatcgtttgtatgcaccggctgagtttactcatcggcgaaatattgatcaaattaaaactacggacagtctgattttggctttacttatctggcaagctaagacaggaattgaatcacaaagaagattctgtgaatgtttcaattgtttatcacactcacgttttaatcggcgttcacgtcagctattgcaattgatttatcagatacggcaagaaatgaataaaaaggttgacctgaatggacatttcttgatcattgacagctttccggtacctgtttgccaaccaattcgcaactatcgtgctaaaatttttcgcggttatgccaacattggttataaggccaccaagaaaatttacttctatggtttcaaagttcatgccattgttagcgatgacggttccattcttgattatgtcgtaacaaaagcatcagttcatgatgccaaggagacagttgaactgctggaaaatgcccatccatctaattactatcttcttggcgacgaaggctatttaggcaaagaactgcatcaacagctaaaacaaatgggttatgaactttggacaccatatcgtaaaaatatgacaggagctaaaaagcacaatgatcatcaattgatggctattcgcagaacaattgaaagcgacttttcgcttctgatctattacaatgccgagaacaatcgagcacgtagtctgataggctttcaaagccggttggaaattgcaattttagcttataatttggcttattgtctagaacgatttaactagcaccacgcgtattttaatattattattttagctattttccttttcttttgattatttccatcatagcctgaccatactttttcatcttcgcttgccctacaccacttacctctaaaaattcactttcattttgtggtttaatttgtgccatatcgtgcaaagagcgatctgaaaaaatcataaatgctggtactttttgctgcttagctaattccaaacgcttttgtcttaaagcttcaaataaagtatcactttcttcaccagcatgagtagtagttactgaaatcttagcaattcgccgtttgactacagttttgccatctagtacatcccacccatgattagttacatgcactagtggatatttgctaccttcaacttctagataacctgaagcaattaaatagtcaatcaagcttatagcatctttttgcttcattcttagagagccaaaagacttatattgtgtagcattcatttcttgcatgcgatgattttttgagccaatcaaacattgagcaactatcgtttttccaaagcgaccatctagttcataaaccatactaatcactttttgagcatcaatggtaatgtcagtcaatttatcctgatttagacaatttgaacatttaccacatggcggacaatcttgaccaaaataatggacgataaattgctgcaaacattcaccagtattagcataatcagtaattgtttgcaacttacgatattgcagttctcgatatttatcatccgcatctgattcatcaataaagtagcgatattgacgcaagtcaccaggatgatagattaaaatcgctttgctttcttccccatcacggcctgcccgacctgcttcttgatagtaactttccatattacgggcacttgaggcatgaatcacaaatctgacattacttttatcgatccccattccaaaagcattagttgctacaattacttgaaattcatcaaattgaaaagcttcttgtacttgacttcgttctgaagaatccattccaccatgataagcaccaacagagattcctttcttagccaaataatctgtcaaactttcaacttttttacgtgtattagtgtaaataatccccgctttatcctgatgtgccttaatatattctgaaatatataatggagtattttgtggtgagttgaccactttaaacgatatattagggcgagcaaaagaggtaacaatcatattctccttgggaatattcaattgttcacaaatatcatcttgaaccgcaggcgtggctgtcgctgttaaagctaatatatttggtctgctttttagtgaattgattccatctaataattgacgataagcaggtcgaaaatcatgtccccattgtgaaatacagtgtgcttcatcgacagcaactagatcaatatctaaaaaatttaactgatatctaaaataatcaatcgctaaacgctcaggtgtaatataaattaacttaattttgccttcatatgcctgacgtaaaattggattaacctcttcttgcggtgtagtagaatttaatgctgccgcattaattccattttgctttaaattatcaatttgatctttcattaaagaaattaatggtgaaataaccaaagttacaccggaattaatcaaagctggtatttgataacacattgattttccgccaccggttggcataaccgctaacacattttgcttttttaaaactaaatcaattacttgtttttgacctgggcgaaaatttgtatagccaaatgtatcttttaaaacttcttctggattcataaacttatcctaactagttaaattgctactttttattctaaattaacaattcaccccaaacaagataaaaagattcacacttttaaataaagaaaaatgtgaatcttttagagttaaatttacttataaaatgtttcttctactgcatgagtaatcgcaatcttatcatgagcataggacaaaccgccctgaatataaagcatgtatggttcacgtaaagggccatcagaagaaagctcaattgttgatccttcaacgaaacttcccgaagccataacaacttcatcttcgtaaccatcctgatgatatggaattgggtcaacaaatgaattcattggtgaatagtgttgaatagccgcacagaattttaccatcggatcaggtttaccaaaagtgacagtttgaacaatatcactacgtggatcactccatttaggtgaaacctgcatccccatttcttctaataaggctgcagtaaagaccatacctttttgagcttcaccagtagtatgagctgccataaagaatccttggtagatatcgcgcaaataaccccaagttgcgccttcaccttttccagctcctggcactgtcaaccgtgaaccagcaccatcaattaaatcctgccggccaactaaaaaagcaccgccttttactaaacctgcaccagcattcttataaagggaaccagccatcatatcagcaccataaaaagttggttcttcacattcagagaattctccataacaattatcaataaaaatattaacatctggacgaacttctttaatgaacttaagcattggcttaatcttagccatagtaaaagtcttacgagttgcataacctaatgatctttgaattgccactactttaattgaaggatccatgatatcttttttagcttggtcgtagtctacttccccattcttcaattcagtagtcttaaaattaattccccattccttcatgttaccgggcttattaccagcaagaccaattacttcttgaatggtatcatatggcgttccagttaaataataaagggtatcccctgggcgaagcatgctgaaaagaccaactgtaattgcatgagtacctgagccaaattgtggacgaactagagcatcatctgttttaaaataatcggcataaatatcctcaattttatcacgacctatatcgtcataaccatagcctgttgatggaactagatcttcttcaccaacatgatgttttctaaataggtccaatacacgttgttgattatacaaaacctgttcatcaattttttctaaacgaggttggatcattttttcaactttagtcactttatcgtttaactcttttggtaaattctctttccaagaaaaactcatttttaactccctatttatttttgattacttctgcttgtacgcataaactaccattattattttcgctcagatatactccctgaatctctggcacaaaaccaggaaacttttcaatagcatgcgccaagacttcaaagtacttttgatctaccgttccccacttttcaccgggtgcaacaatgaaaacacctggaggatatggcaaagctccttcggcagcaattcttccaacaacattttctaggttgaccagttcattttgatcttttttaaaaagctgatcagctgtagctggtgtcatttgatagtcttgcatccctgatttagaaaatagcttttgctgtaatacaaaagtattattttcctgatagtactcatgcatctcttgacacaactgtttcagggtatagccttgataacgctttggatactcattatataaaaccggcaaaacatctttcattaagtcatcttctagatagtgtttttcaaaacttaaaaaagcttcaagtaaagtatctagttctgcttgactatctcccggtgtaagtaaaaacaacaatgaattcaaatcatttttagctcgaataatatgattttccattaagtattctgccactaccgcgcctggaatacctgttttctcatattttgcatttttaacatcaatcccgggagtttttaccgtaatcttcaatgggtcaatcattgcttcgcctggaaccattttacggaaaccgtgccaatccgtattttgtcccatttcccaatattctgcattggtagccaattcatcagtcgaaatttcggcaaaattgtcaggaactaatggcttaaatagcttagactttttgagtagttttttccgccattcaattcccattcgcagagtttgatcccaccactttttatttcctgctccagcagtaacgtaggaattaactgttaatgaagcataaagtgggtatgcataactggaagtaacaaacttcagataagcatgattaaagtgcttatgatcaacatatcgtttttgtcctttaatatgagcatccttttttagaatctgtgacgcttgagccatacctgcttgctgtttatgtaatgactgagtaaccaaaatacctggatcatcaggacccaagttaagtagaagtggtgataaatgtctcataattggcacgaattcttcaaagccgccccaggcacagtcaaacagaacataatcacaaagtttaccgattcggtcaataatccactgtgcatcataaaagactccatcataggtttctgcttgtacgattgttaacctaaatggacgcttagcctttgcctttgccggatctatcttagctacttcagctctaattttatcttcagttaagaaggctggatccatttctccaattagtccaagtgcatttcgatcagttggaatgtagaccggctttgctccgctcattaccaaggcagaattatacaaagatttatgattatttcgatcaaataaaactagatcgccttcagataaaagtgcacttgcgcaaatagaattagctgaagtcgttccgttggtacagaagtaaaccttatctgcatgataagttttagcagctttcttttctgcattaagtggcgttccagcatgcgtcattgtatcccctaattgaggaacagtatcacttgtatcggcaaacattagatttttaccaaagaacttattaaaaactactccggcaggatgtttgtcataatattgcccattatggtgacccggtgtagtaaatgaaattggttttgcttgagcaaaattgatcaagtcggtcaaaaagcctggcaccatttgcttttcatattctgtagctttctgagtgacttggtcttcatctacctgatcagttactttaatcaatggaatcggaaagccagattgttctcttagagcttctgcttgttttattcctaatgcatcatcatttttgacaacaattgcggcaagttcagcactattttgtacatcgccaattggaattgacgaccaacctttcatcttattaacattgacgccatttccaatggcaattttcaaaaaatccatcctttttctttccattttgtccacgaaaccgttttacatattgcaaaactttaaaaagtctttataatttttctacagtatagcgtactttttgcattctttcttaaaatacgctacagctgaaattattatataaatattggaggtttttaacaagtgcatttgccttgctcgcctccgagaacagctatgtcaacacaacaataaaatagcttaacttggaggaatttttatgtcagaaacaatcgaaacagtcaatttcgaacccggcaaaaaacactacatgtcatggccggttattgcattgatcgacttcgtaacgattatcagttttgaaaatattttttatccatttcaaaatcaaggcttatcagtagttgtatcttggattttcctactcttcgcctacgttattccttatgcattgatgtctagtcaaatgggcctaacctttactgatcaagccggtggattggcatcttgggtacgtcattcatctaacgatacactgggctactggacttcatggatgtattgggttcaaactgttccttatttggtcgatgtttctaattcagttattgtgtccttttcatggattattttgggcaacaatactttagacaagcatatgtctactttttggtttgggattttgacctttgtcattattcttgcctttattttggttgaaaatgcaatcaagaattcacttgaactactatctttaattggtggtggtgcaatgtttattatgtctatgctctttgttttacttgctgtttggtcagttatgcatggacaccatattgctacccaaccatttaacttggccgcatttaagccatcatttagtttacgttacttttctaccactggtcttctaatcttcgccatgtctggtgcagaacttgctgctccttatatcgtacaaatgcgcgatccaaaacacgaatttcctaaagcaatgtggatgttggctttgatgactggattcttgactatcttcggtactttggctttagcaatgtttttcaatgctcatcatattccacatgatttcaagatgaacggaccttactatgcatttcaactactaggcgaaagccttggttggggcaaagtattaatgtacatctttgctgttgttcaagccctctttatgatggcccaattagcagttttacttgatgcatcaagtcgtgtctttgccggtgacgttgccgacaaattcatgccaaaatggttaactgggaaaaaagacaaaacaggtcgtccagttcactcgtacactttaacttgtggtttagccttattcttgcttttacttactgggactttgccaaatattaattcaatttacaattggcttttaaatatcaatggtattatttccccatacaagacttgttgggtattcttcgctttcattatgttacggatgcaccaagagaagttccactcagattatgtcttcattaaaaataagactggtgcccttatcatgggctggtggtgcttaatctttacctttatctgtgctactttaggatttattcctcaagaagcagaagcaacattcggtagcgcagcctttaatcaccaattaattatgaatattattacagttatcgtactctttggcttaggcttcttactaccatacttaagaaaacgcgaagaacgtaaagaaatgaatatataaaataaacatgcttcgatcagttcgaaaatcgaggcatgtttattttattattctaagatttcaacctgcatcttactaggaacattaacaaagtcgaattgtttttgaaaaacatgatcaaaccgtaaatcataaacagaaccaataattggtgttaatgcaaaagctcgtaaagtgttcatatctttagttttattagcataaatatgatgcattggtggtttgattttataaattcgttctaaatattgtggacttacctcatcaacatagccttctagagtgaaaccaatgctagtgagagtttctcttccgcgcaaagcggtaattgaaactttattgtgtcccttaatatggcgataaaatgacttctgattagtcgttgcaaaaatcagacgaccatcttcattaaagtcaatatcgataatattggtatgtggatcaccattttgatcaacggtaccaaaaattactgaatggaaacaatcaacgattagatctaggaattcgtcgttacttaaattgcgatcgagttcaggaacatgttgtctcataataatctttccgtttctatatactttctgtaatttttatctatattatttcttatagtgtacatgacacgattaactaaaaacaactttaatgctcattattttcccattttaaatgtataattgtttaatattaatttttctggtaaaatttcagctaacaaaaaataagaaaagaggcagaatatgaatttagactataagaaattggcccaagccaaaaaggacgacattcttcgtgatcttgacgaattaatcgcaatcgactcatctgaggatttgaataatacttccgaagagtatcctgttggtccaggtccagttaaagcaatgaagaaattcttatcgtttgcacagcgtgatggtttccatatcaaaaatgttgacaagtacgctggccgtgtcgactatggtactggtgaaaaacgtttaggcattattggccacatggacgtggttccagctggtgacggctgggtaactgatccttttaaaatgttaattaaggatggtaaaatcattggtcgaggttctgccgatgataaaggtcctgccctagctgcatattatggcatgcttttacttaaagaagctggatttgaacctaagaaaaagattgattttattgtgggaaccaatgaggaaactaattgggttggcattgattactacctaaaacatgagccaacccctgatcaagtattctcacctgatgccgaatttccaattatcaacggtgaacaagggatctataccctgaccatgacctttaaagatgacaataaaaagggatcagtaatccttaagtcattcaaggccggcattgccgaaaacgtaactcctcaaaaggcctatgcaactattgttggtagtgatttagccacaatgaaggaaaaatatactaagtttttatcagataataaacttgaaggcgaattcactattgagggcgatgaagctaagattgaattaactggtcaaggtgcccatgcatctgcacctcaagttggtagaaatgcggctacatttttggcagtatttctagatcaatttgattttgctggtcgcgataaaagctggcttcatttcttagccgatgttgaacatgaagactttaacggcaaaaaattaggcgttgctcatcatgatgacttgatgggtgatctctcaagtgctccatcaatgtttgactacgaggaaaatggaaatgctgttttgaaagataatattcgctatcctcaaggtactgatccagataagatggttaatcaagttgaagaaaaatttggtgatatcttaattccaagttttgcttcatttgaagaacctcattatgtacctggagacgatccattagttcaaaccttgctcaaagtttatgaacgccagactggtaataaaggtcatgaagtcgtgatcggcggtgggacttatgggcgtttatttaagcatggagttgcatatggcgctcaacctgaagatgctccaatggttatgcaccaagcaaatgaatatatgaaggtagatgacctaattaattcaattgcgatttatgccgaagctatctatgaattgactaaggacgccgaataaaaatttttacatgtatcaaaaaagcttatatactgatcttgttttaatgcagtatataagctatagaaagttgctagtgtcatatatcactagtgacttttttatttttccaataaaacttcttcattatttttcttagattttagccaaaaatgatgtcccaagtaacaaatagctacaaaaggaattgtatagtacaatgctactctttgggttggatcgaaccagattaatacacaagaaagcaggcttgatataaatgcaaaatatggaattacaggataccatggggtcttgtacttcaattcactgagttgatgacctgagtttaaaaatgcccttctaaacttcaattctgaccatgcaatcgccgtccaaacgaatacaacagctaatccagaaatagaaactaatactagataaaccgtcgaggcagcaactttactagaaatcaaagcaaaaattccgtctaacatacttactactaatgacaatactggaataccacgcttattagttttggtgaatgctttaggaattgttccttcgttgcccaacgaccaaagcattttagttgaagcatacaaacctgaattggccgcagaaataattgcagtcaaaactacgaagttcataatatttgcagcaaatggcacatgaattaggtcaagcacatacacaaatgggctttgagttactccagccgtatgataaggaattaatgcggccataactacaattgagccaataaagaagataattaaacgccaaagtgttgtcctgattgcttcaggaatagctttctgaggattctctgcttcaccagccgtaatgccaataagctcagttcctgaaaaagcaaagtttactgttagcattgttgtaaatactccaccccagccgttggggaaccagccatttttataaaaattaaccaatcccaatgtgcttgataaactttgctcaactgatcaatcaaagctgttgcggtccataatttattattagtatctacgccttgtttttccaattcatacgacattgcaccatctaggactaatcccctatttttaatctgttcaagcaaacccatttttttcatgctgtcaacattattttagtaaatttcctaaataatagccgcaataaactagaaccaagccacccagatatgatgacaccgcgtagaatacaagaccacgataatttttactcttataaagctcaactaattctgtattcatagtggaaaaggttgtatagccacccattactccagttcctagtaatgcataaataaaagtgttagcaccaattccaaaaatcaagcctaaaattagtactccagttaagttaataaacaaagtcggtgtaggtaaattagaaaatttattaccaatccattcccaatgctttttaccataattagtaatagcataacgaagcatagctccaattgatgcaccaattcctgcaagcaaaaaattcatcgtgtattcctttcctttcttactaattgaccaacttttttaccaattttcattcctaacatagcaaaaaaaaagccaaaaataattgagctaaagtaataaattactgcttcgattggcaaattagcctgcatattttttaaaacatcaagattaaaagttgaaaaagtagtaaatgcacctacaaagccagtacctaatccaactacaagccactgcctaatctctttagtttcaataaaaaagtaggtgaaaaacgctaataaaaagcaacctatgacattaccccaaaaagtaccataatagctgaagtttgcatttaaaccagcacgtgccataccaccaaaaaaggcgaaaatagcgatactaatgtaattaataaattttgaattcaaacagattcctcccacaaaaaaacgtctactttacccctatcggataaagtagacgtcattagattttactcggttaatggcgaacgtcatcgcctattcagttgacagttatcatcatacgacttttctgtttggttggcaagttgtattgtgtgcgtgtcgcaaagcgacacgcagtttgattatttaataaaaaaatttagtaacaacgtgcttgaaataatgtataattatttttaacgaatgtttgaaaggagcctcaatcttgacttttccatatgaagataaatttcgcatttactgtaaacaacaaaagaaactagccgattcaactatttctctagcctgttcttcaatttcaactttttgggattattattctggtagtttagatgctactgaagcaaatgtagaaaatgttacaactggagatatacgtaactttttagattcacttgaaaataaactccatatgaaaagtaatacagtaaataaatatcttagtcacataaagatgtattttgtttttttgaatgaatatggctacatcattacttatccattgctcactttacgtggtaatcgcttcaatcgtaagcaacactatgttattggctgggaaaatcatttatcagaattaattcaaataaaaaatattcatcctgaaactatcaagatgatggctgctattgcttgtggttttaagccaaaagaaattatgattttgcatgtaaatgaattgttggtaaaagttaaagaaaatgatgtcagagaatatatccaaaatcacactaattttgccaataacgataatccctatctgtttgctcgccgcgatggcaaacattacgcttctgattttaatattaacccaaaaattgcccctgaccgttcaatagtcggcatgccattaactacacataagcttcggatgtcttatgtctactctgttttgtctaattcaaaattaagagaagcggattatattgaaaaattacatctttcaatgaaaactttaaattactatcgtaaaaatatgacactctatgtagaaaccagtaaatttgaattaaaaaaataaacaagcaaaaacgactacccattttgatatagtcctactttagtagacagtacaaatatataaaattgtactatctatgaaagcaggactttttgtatgtctagaaaaagtaaatttagctatgaagctaagcttaaagcagttaaacaatacataagtggcgaagcatcacctgcttcaattgcgaaagttttaggggctggcaagactacactgcgccaatgggtatatgcatttaaagatcatgggccagaagcattaagaccacataaatataatcaaagatacagtaaagattttaaactcaaatgcatagctgcctatttaaatggcgaaggctcatatgattatctaacaaataagtttggtttgcgaagtgctgcacagttaaagcagtgggttatcaagtataatagtcatcaagaactcaaggactacaatcctattctggaggcttatatgactaagagaaaaaagacaaccctagaagaacgtaaacagatagtgaaatactgcaaggatcatcaatggaactacaaggaagcagctcttaaatttggctgcagctatgcccaagtatacaactggtcaaaaaaatacagcgcaaagggaactgacggcttagcagataggcgcggtcatcgtttaaaagaagctgagctatctgaaactcaaaggctaaagcgtgaaattgaacagcttaaaaaagaaaatgatattaaagaccaagagatagccttcctaaaaaaagtgaaggaattagaaaggatgtgtttgctggacagccaaaacaaagacaaatagcacttaaacaacagcagcgaaattctctttacagtttgatcaaagaatgtcaccgagaatataagtggtcaattgaatggatgtgcaaacaagccaatattgcccggtcagcctactacaaatggcttaatcataagccaagcaaacgtgaactaagagatcaaaagattcttaagcgtattaaagaaatagctgagagcaataacagcctctttggttctcctaagatgactttggctttaaacaatgagctagcagacggtgaggccaaaatataccgtagaactgtggctcgcttgatgtgcgtgaatggcatctatactagcaaggccagatttaataagaggtatcgctatcaagctgctagaccggaagaaactgccgaaaatctattgcatagagacttcaatgccactaaacccaatgaaaaatggtgcactgacattactgaagaaaaaattcctggaacaagtcaaaagatttatctctgtactatctttgatctatatgatcgtttccctgttggctatgctttaagcaagcgcaatgatacagccctagttaacgctgctctgtcaactgcttggaaaagagagcccaatagtcatgcaatgcttcatagtgatcgaggatttcaatttaccaggatgccttttaagcatgagctagaagaacatggcatgccacaatcaatgtctagaattggccgctgtattgataatggcccaatggaaggctggcaaggtttaattaaagaaatgcgagaagttctttatccgaaggcaaatagctatgaagagatggaaaaagcctttaaagcaagtattgaatactatattaattatgatcctcaggagcgcttcaatggcaagagcgcaggtcaggttagaaaagaagctaagaataatccagagaatataatttcatatccaataaaacaagataaaagatataaagacttttggaaaaagattgatgaaaagaaaaatcagctcgcacaatagcgaactgattaatcaaattaatttatatatttaagctgtctacttgacacggtacggatcatttcgagtagtcgtctttgtttgttgaaggtgaaatttcaacaaatctatcttagtcagaacttggagttatctattagtaccagccatttgcttgccagaaacttttagcagcgctccaagagccatatctagatttgacataattatccgctacacgttcttggttagcagctgaataatcaccattcaaataagatgaagaaagttgatacttacctacatattggccatttctagcactgtatgagccaccagattctttgcttgcaatccatgcctttgcactagcttcggaacctgtcgcggttgatgaatatgaactagttgttgtcgtcttaggtgtgtagttcacatttgaataagtgtatgaactttgactttggctagcttgtgtagtttgttgagctggcgtttgtgtttgagtgtaggtattttcttgtctagcttgagtattttagctagtagtataattagttgccaatacccattgatttaagccaagatcataccacttctgtccctttgaatcataagcagtttttataatcttccagttagtacctgcagctagagtttgaccagttgcaactggattttcatagttattgtaaacggtagtagcttgtgtagttgtatacactgctgcatcattttgcacaacggcagcttgtgcttcattattatctagttgattgattgcaccaatacctgcaagtgataaagcagcaacagcaatagtcttagttaaaatagatttagttttcaaaaaacatctctccttaaattaaaacgtcaattactattcatcatttttgttttattattctcttgcaattgacattttatataatacctgcttcgagttgcagttccatcacagtcagatcacacaatgattaaagaaaaatgttttttcgtaacagttggaaatatttttaataaatctagatttctctgcaatatttgtaaaaatcatgcaatatatgaacaaaatttgacgacaaaataagcatccctacgccataaaagatcgttttagggatgcttatttaattaataatctaattcttgatccatacttgcaggccagccaccaataccacgtttttgatcaaggccacgcaatgtctccatctcttcagcagtaaattcaaaatcaaaaatatccaaattatccttcatgtgtaacggattcgtcgagccaggaataatcatgatattttcttgtaccaagaagtgtaacgcaatttgtggcactgtcttattatacttctcagccaaagaaagtaaggttgggtcattaaataaagccttcattccttcaccgagtggtgaccaagattcatgtacaatattattttcaattaaatatttatgcattttcttttgttgcttaaagacagacgtttcaatttgatcaactactggcttagtatcgaaattattcataatttcatttacttgatcatggttgaagttactcagtccaattgaacgtagctttcccgcctgatatgcctcctcaagtgcctggtaagtacctaaactatcagacataggccagtgaataatcattaaatcaaaatagtcttgctgggcgtgaattaacgattcatcaatcccattcttcgtctctctataaccacttgtttgcgctttagtggtcaaaaaaatgtcttcacgtttaatgccgcttttgttaatagcattgcctacttctgcttcattactgtatgcttgagcagtatcaattaaccgatatccagccttcaaagcctcgacaaccgctccttcagtaattctaggctgaattctatatgttccaaagccgaagattggagtttttacaccgttattaaaagttaaatattttattcaggatcagatgcagagtgataagtaatactaaatccagcttgatattccttacctggctccaaatgattcataccatatttgtgctctagctcaccatcagcatcttctctatctgcaattccccaccatggctcaatgcatacataattagcggtatttggatattgtgaccaaatgccaacatatggtgcatttctagtccaaacattgatgtggaacttactcttatcagttctcaaagatactttattgtcatgaccatgtaattcataaatcaaggcatcatctttaaatagctcatcacttaaaccaataaaactatcagtcgaagctagagaacgattattccagtcaagatatgctcctttaagtgggatttttaccctagcaatagatggatgcatatcgaaataataatcttctttctcttccccattatttactggtaagttaaatccagggtgaccacctacaccaaaaatcatagtttcatctgatttattaactacgctaaagttttcttccaataaattattcatcaaattatagttaactctgaattcaaatttaaatggatacatttcacgcgttttttcattatctttcagtaagaacgtgatactttcttgtgtatgattctccacttcaaaatcacaatcacgggcaaaaccatgctgacccatatgataggtcttaccttgatacttatattcatcattcttaagtcgccctacaattggaaaaagtacaggtgcatgtctgccccagatctctggatcagcttgccacatatattcttcaccggtatgagctcctttaacgctctgaacttcagctccgtgatccgaaatcactacttcgatcatattattcttgattgtgtaatccataactaaatttccctctacatatcaaacagttaaaaatcataatgtaatcgcttaattacttatattttaacattaatgcgtcaataagccagaataaaaacaaaagaaaaaagcattcaaactttgaattgaatgcttcattcgtgattctttgatcaattagagaataaatttagttaagtctttattcataataatatcgcctaacttatcttcaacataggcttcagtaactgtgatttcacccatttccatatcaggcccttcgtaaagaacgtcttctaagagcttttcaagaatagttgaaagtcgacgagcaccaatattatcagtgccttggttaacatcaaaggcaatctccgcaattttatcaacggcttcttgggtgaaaactaacttaatgccatctgccttcattaaagcaatgtattgcttaagcaatgaattttgtggatccttcaagatcttgacaaaatcgtccttggttaaagcgttaagttcaacccgaattggaaaacgtccttgaagttctggaatcaaatcactaggcttactttcagcaaaggcacctgcagcaataaacaaaatatgatcagttgaaactgggccatattttgtatttacagttgagccttcaacgattggtaaaatatctctttgaacaccttcacgagaaacttcaccagaattacgtttattaccagcaataattttatcaatttcatcaataaagataattccgttattctggcttctttcaatagcatgttgatagatagcgtcatagtcaactaacttacgtgattcttcttgaatcaaaacttcacgtgcttcttttactgataaagtacgcttaacctttttcttaggcataagatcactaagcattgagcccatatccatccccatttgacccatcatgtcactcattgggttggccttaggagcttgttctacctctatggtaacttcgtgatcttcaagtaagcctttagctagcttttcagccacatccattcgtttgtttcttacatcagcagaaacatcctcttcatgatcttcttcgcgattattttctcccatcaacatagacatcatatcttgcatttgctgcatttgattttcacgacgttcatgtttctctgctggagctaacaaacgaactaattctttatttgcttctttagttgcttgagtctttacacgagcaaattggtccttttcttccattcgtacggcttcggaaaccaagtcacggaccattgattcaacgtcacgtcctacataacctacttcagtaaacttcgttgcctctactttaacaaagggagcttctacaatatcagctaaacgacgagcaatttcagttttacctacaccagtaggaccagccattaataaattcttaggcgttacttcacgttgcatttctttagataactgcattctacggtaacggttgtaaagagctatcgcaactgattttttagcttcatcttggccaataatatattcgtttaaaattttaactatttcttttggggtcttaatagccatttccttcactcctaaatttcatcagtgacaattttatcatcagtgaaaacatcaattcctgaagcaatctttacagcttcatgtgcaatttcatcggccttcatatcttttgcgtgtcgagtcatggcaatcgctgcggcttgagcaaaattaccacctgaaccaattgcaactacgttttcatcaggttcaagtacttcaccattacctgaaattaaaagtaggtctttgtcatcaaaagcaatcaacattgcatttaatttttgtagagttggatccttacgccatgcttgagccatttccacggcagcacgacgaagatcgcctgagtagctttcgagcttgccctcaagcatatcttgaaggctgactgcatcagctacaccaccggcaaaaccaattactacacgatcatggtaaatacgacgaatcttacgcgctgttgccttggcaataactttttcgcctaaggttacttgtccatcaccggcaattgctgtttttccattaaatcttactgaacaaattgttgtcatgttaaacctcaactttctttattacgaggaaaatatttttgataatctgattttaaatgagccattgttacatgagtatagatttgcgttgctgatagactactgtgtcctaataactcttggacacttcgcaaatctgctccattattaagcatcgcggtagcaaagctatgtcgcaactcatgtgggtgtactttaccactaattcctgcctgattaaaagttttttgcattacagtttcaattccgcggctagtaatgccagttccttgattatttaaaaatacatgctgttcatcatcatttttaagtaataatggacgtgcattttctaaataagcaatcaaagatttttttgttttatcatcaaaagcaacatagcggtctttatttcctttaccgtgaaccaaaattgtctgtaagtctaaatcaagttgattcaaagtaagattactaacctcacttacccgcatccctgtcgcataaaacagttcaaacattgccaaatttctcatcgtcaaaggcttatttcctttcaatgaatcaaaaacctgctttaattcaggctggtaaaaaaattgcggtaattttttctcaccacggcgtaaagtaataccctgagttggatcgattgccactagtttgcggcgggttaaaaagtggtaaaaagaatgcaggctggacatcttgcgcaactgactactacgggctaacttgcgttctgctaaatgttgtagataaacctggatatcacgttctcttactttagtccaacctgggaatccaccattttcatgccaaaacctttccgcttcatgcaaatctgtttgataagctaaaacggttttcgcactataatgacgctcattttgtaaatatgataaaaattgatctaactcactttgcctttggttcattaatctaaaacttccgtcttaaattcatctaaactagcaagaccacgttcactgaccttctcatggcgctcacgcttcttgcgaatcttcttaccctctagtggaggtagcaaagcaaaactagcattcattggttggaaatgtttagcactcgtagtagttatgtagttagccattgagcctaacgcagtatcttttgggaaagccacagtatctttccccatagcttcacgtgctgcattaattcctgctactaagccactacctgcactttctacatagccttcaacacctgtcatctggcctgcaaaaaataatccaggctgctcttttgcctcgtaagaagctgtcaaaacttctggtgaagccatataagtattacgatgcattttaccataacgaacgaaacgtgcattttctaagcctgggatcattgaaaatactcgtttttgttcaccaaatttcaaatgagtttggaaaccaacaatattatacattgaagctgcagcattatcttggcgcaactgtacaactgcataaggagttttgcctgtatgtggatcttctaatcctactggtttaagtggaccaaaaagcattgttttagccccacgcgctgccattacttcaattggcatacacccctcaaaaacatcgctattttcaaaaccatgtaattgcgcagtttcagcgttaattaattcctgactaaacttttcatattgctctttagtcataggacaattcaaatatgcagcttcaccacgatcataacgcgactttttataaacaattttcatatcaatcgagtcagcggccacaatcggagctgctgcatcaaagaaatgtaaactatcagttccagaaaatttttgaatctgtccagctaaagcatcactagttaacggaccagttgcaataattgtaatcccatctttcggaatttcagtaacttcttcttcgtgaacagttacattctctaacccacgcaaagtgtcagttacgtatttactgaaactatcacgatcaacggctaatgctccacctgcaggcacttgagttttgtcggcagctttcatgatcaatgaatctaaatgacgcatttcttcttttaaaagacctacagcattagataattgatttgatctcattgaattggtacaaaccagttccgcaaattcaccagtttcatgagctggagtctccttttttggtcgcatttcataaaggtcaacatgaataccacgcttagctaattgccaagttgcttcactaccagcaagacctgcaccaataactgttacattttttggcatttactcacctatattttctatgttaattgtttttttcgttttcactgtcttcacgataatcaccgttaggacaaagaatcactggaccttttttagaatgcttttctactaaaaagtggccatcatttggacaatttctgccaattggcttgtcccatgagacaaagtcgcattctggataacgagaacagccgtagaatttacgatttctacgtgatttcttttcgacaacctgacctttgccacattttggacaaactacaccgatttctttaatgattggcttagtattacgacaatctgggaaacgagaacaagcatagaacttgccatagcgtcccatcttaatcaccattggtgcaccacaaatatcacaattaaagccagctggttcatccttgatttgtaccttttcgatttcactatcagccttatttaattctttcttaaacggttgatagtattcgtcaacaacatgaacccaatcctttttaccatcttcgacttcatccaattcattttcaagtcgggcggtgtaatcaacatcagtaatatctgggaagaagctttcaattaagccatcaacaatttcacctaattcagttggtacaattgaacgaccatcaagtttaacataatagcggcgttgaattgtatctattgtaggtgcataagttgaaggacggcccacgccattttcttccaatgcgtgaactaatgatgcttcagtatagcgtgctggtggtaacgtaaagtgctgtttgttatcggacttagtcatcttgaccttgtcaccctcttcaagatcaggtaagtcaacattcttttcttgttgattatcataaaccttggtgaaaccagcaaatttcaatttagaaccagtagttctaaaaatcacaccattttgaacaatatctgcacgaacagtatcataaacagctggggtcatttcactggccaaaaaacgtgaccaaatcaatttgtataaacgatattgttccgtagttaggacactctttaatgactccggtgtgcgatatacagatgttgggcgaatggcctcgtgagcatcttgtgcgtcttcttgattcttaaaatggcgttgactcttagctgcaaattctgcaccataattttcatgcaaaaacttagaagcctcttgttgggcaactggtgatgttctcttagagtcagttctcatataagtaatcaaaccaactgttccttgcttacctaaagaaatcccttcatataattgctgagcaatactcatagttctacgagtacgataacctaaacgcttattggcttcttgctgcattgtagaagttgtaaatggggctgctggctgacgccgacgttgccgagcaacaactttatctactacaaagtcctttttcttatcgattttagccaaaacatccttaacagaatcgatattaggcaattctttctttttgccatcaacaccataaaaggcagatttaaaagtttctttacccttagcaaattccgcatcaattgaccaatattcttttggcttaaagttcttgatctccttttcacgatcaatcactaattttaaggcaactgattgtacacgtcctgcagataaaccttttttaactttggcccaaagaattggtgaaagtgaataccctacaattcgatcaagtacacgtcttgcctgttgggcatcaaccgtatccatatcaattgtccggggatgcttgaagctttctttaactgcatccttggtaacttcgttaaaagttactctattcttggctttttcgtcaagattcaatgcgtgcgctacgtgccaagcaattgcttcgccttcacgatcggggtcggatgctaaataaacatccttagccttcttggcttcgctttttaattctttaatggtatcgcctttaccacgaatggaaatatacttaggcttatagtcgtcttcaaagtcgattcccatttgtgacttaggcaaatcacgaatatgccccttggaagcaataacgtgatagtttcttcctaaatatttttcaatagtcttagcttttgcaggtgattccacaatgactaaggtctttttacgtttttttgttgttttacttttcgctttagtaggcattaactgcctccttaattcttattttattttatgggtacagtccaaaaataactaatactttctgaattgtcaaatctttatcttgttaaatttaaaatcaacaattggcgtagctcctgcttcaattaattgattgggacctgcagacaatgcattagtaattggtccaggtactgcataaatatcgcgattttcttgtaacgctaaattagcagtaatcagtgaacccgacttttctttagcctcagtaacgattatactttgacttaagccggccaagatacggttgcgttcaggaaaacgatacggacgcggtggtgtatcaggcaaatattcactaatcaatagtcccttttgcacaatctcttcttgtaaagcaaaattttgcattggatatgaaaaatttaaaccattgccaataaccgcaattgtttttccttggttgaaaagtgcagccttatgagctaaggcatcaacgccttttgctaagccacttgctacaacctgaccagattgcacaatattaggtaccaagcgattaataacatcttgactatacttagtcggatagcgtgagccaacaattgtaatgatttctttttgcagtaaagaaatatctcctcgggtaaacaataccataggtggtcgataaatttgacgtagtttttctggatatgcttcatcgaaaaaactgattacgtcacactgctgttcaatttgttgtaccattcgatccaactgatcatcctgaaaagcgcgatagcatgcatccattagttcctcagttaattcaatttgttctaattcttcaaattcaatttctgtttcatcagttacctgattagcaattgtcagcaatttaacataaccaatccctttttgcaattttaattttagtagaaattctgtttttttcataaaaaaagccctccactatttattacgcaaaaagagaccattatttttttataaattgaaatttattcaaaaaaatcactgactggagcaaatgttttgcggtgaattggcgtagggccatactttttcaaggcttcaatgtgctccttggtgccgtatcctgcattatgatgaaagcaatattgagggtatattctatcataatcatccatcaattgatctcgaaagaccttggccacaattgaagctgccgcaattgaattcgacttagcatctcccttaatcaatttaacttggggtagatttactggcacattcattgcatctaccaaaagtgcattcggcttaacatcaagtgctcgtactgcttgagccatcgcttgacggtcagcttcataaatattaatttgatcgattacctctgcactttttactccaataccaacactaactgcttccgctaaaattttaggatataacttcaatcgtttctctgggctcaatttcttcgagtcgtttacatctaataaatcaaaatcttgatcaattatcacagcagcagttactaccggtccagctaaagggccacgtcctacctcatcaacacccgctactaattgtcccttttcccagaactttttttcataagaaaagcgacgcaaaaactcttctttttttgctagtaattttgcttgacgcttacgataactaactaacaatttttgtacgccggcccgcggatctgcctcaagttcgttaatttgggcttcagagacctcagatttcaacagctcttttatttctttaattgtcatggtctatctaacgtaatccttccgattgcacccttacgcaatttttgtaacataaataatgaaaaacgatcataatcatcacgcatgccatatttttcagtcattgacaaaagcaaatctggatcagccatatcagcaatttgctgttcaggtaatttagaaaatttaagcaaatccttagcataaaattcacgtaaatttttcaaaacaaataatgctacatcatctgcatgaaaaacactatccttaattgcaccgaaagcagctaatttataaccaacttcctgatcagaaaatttaggccataaaatccctggtgtatcgagcacttgaatattagcatttgttttcagccatctttgtcccttagttacacctggtttgttaccgacttcagccacgttccgaccaactaaacgattaatcaccgttgacttgccacagttaggaatacctgccaaagcaattctaatagtaggatttgaggcccctcgtgcttctagcttctctgttttggcagctgccgccttttttactaaggaaaccaacttctgcatattagtattgtgcaaggagtcaagtgccaaaacatacttattatctccagctaattctgctgcccatgcctttgttaaaactggatcagctaaatcagccttatttaagataataatatgtggtttattaccaactagtccttcaatcattggatttcttgaagcttgcggaattcgggcatcaagtacttccaccaaaacatcaatcagtcctaacttatcttccagttgattacgagccttgttcatatgccccggataccattgaattgttgccatattatctcttctttctaaaattaatcattttcatcatctaagaacaccacttctgacatcaaaatctgtctatataaagccagaaagcctcgacgatattttctctcttgttgtgcaattttacctaaatagtcacgttcttgtctaaaagcatatctatatacctcagctctaaattctttctgatcatcgggtaattctttttgtttaattgtatactttatttccctagcaaaatcaaccatagaagtttgattcatttgtgcccttaaatcgaattttaattgttttcgaatctttttaggtaaatagatctttttcatttgatccatagcatactcaatcattgccacacgaactcgatcaacttcctttctttgatcaaaatcaggtatatctttgtccaagatcatgtgaaaaacaattgttggaacaatcatacttagtaaaataagcgtaatttcactcaccaaaattaaatggaaatctgctacattaatacgtaaatcatataacgtatatgctaaagcaaaagtaactgctccatgaatgccacccagactaaaaatcaatgcttctttattactcgtttttcctttaatagaagggctaaatcgataataaaagtatctaataagcaaattagctaggtataaaattattccgatcaaaatcgcatcaattgtttgttgattaaaatgtcttccctcattgaccgaacaatgatgattcccaaaagcaaaaagacaatcccatttaaaatatcaatcagaagttgcgataattgattactgttataaaaaataaaggcattagtaagcctgcttcgctcagattcaacgttatgaatcaatccggctgcaacgactgcaataattccagaaacgtgaatttcttctgctaaaaaatatattattaacggtgtcaaaaagaatatgacatcaaccggcattgcaacaccagcagataaatgatatttggagcgaaaactttcctgacgcaagaaaactaataaagtagccaccaaagctcctagaaaaaacctccacctgcagaatataaaaaattacctattgcttgtccaatccgtaattcttgatgcaagtaccaatcaactgccatattaagcaaaatgatacctgaagcgtcattaaacaaagactcatcttttaggtaaaaagcaatcttcttaggcagcttcaatccatgtgttacagattctgttgctgtagcatctgttggcgttgaaattgcagccagaataaaagccagtggtagagagacccatactaaaatagatcccgaatcccgcagttatagttgccaagataatcataataaccgttaacccaactattgcgccccacgaacgtaaaacattatacaacctagtacgttgtccctcaaaaaatagtaatggcgctacaatcaagcccataaataattccgagctaaagtcctcaattaatgaattagtttgtggtactagtgcaatagccgctccaatcgccattgcaatgtaattaactgatattctcttcaaaaagcgttgttgaataatcgtcgcaaatgctaccgcaaagacaataaaaccaataaaaattactacctgcatttttctacccacttaataaaaaagcccaggcatctatcaggcttgggcttaatacatcattttgtcttcatacattcgataagcacgatcaaaaattgacatacttggtaaataactagcattcaattccaaataatctgacaatttctcataatcttgttcttgcttaggaaaagtcaggtcatgctgtgcattattcgcaaattgagctacgtcatcagctgaatctgcatccctttgcgtcattaaatatcgataaaaactttctcggtaagccataattactccacataatataagatcgcataagcaccattgccagcatgtgttgcgataattggacttgtctctgccactaaaacattaatcgcaggattgattgcacgaattttttcagctaattcttccattaattcaggtgtatcaacgtacgaaatgcctacttctttaatatgctctttattatctgcgatttcttttaacactcgttcatcaaaagcacgtgtaaatttcttacctcgtccttttttggctacgattaacttaccttgtggcatctgaagagcgattctaatattaagcatagtagcaattcgaccagaaagtgcacctaaacggccacccttgattaagttttgtaaattaactaccatcatttccagtttttgagtactacgaatctttttaacatgatcaataatctcagccatgcttttaccagcctgagcatccttagcagcagccaaaacttggaagccttctgccctgtcggttagttcagagtcaataattgtaacattatcgctttgacctgcaatttctgcagcttgacgagcggcatctatcgtaccacttaatgatttagctaagaaaataccaatcacttgactgccatctgcggttaattttttaatcacatcaacaaaacggccaattggtggctgactagtcttaggtaagctctccgcttcattcatcttcttgacaaaatcacttctagtgatatcaatcccatccacatatgacttaccgtcgatggtaatcgtcaatgggactactgtaatgtcatatttttcaacttcttctggtgttaattggacggaagagtccgtcataacttttatcttcgacaacgtattcgccttcaattctaatttgtttacccgatttatgataaaatgtaagcaacatatatactgtattgtatcaaaaaactattagaagaaaaaaggattgattacacttcatgaaaattagcaaactttggcagcaaccagaacaacgatcagaaaggtactaccttctagataatatttttagtgccataactcatgggattggtttcggactagcagttaccggcttagtaattttaattgtaaaggcagctcatacaggcagcccgatgcgagttgttactttcacaatttatggctcttgcctggtactgctttatttattttccacactatatcacagtttagtttttacacgggccaaaaatatttttcaaatttttgaccattcctcaatctttcttttgattgcaggatcttatactccatattcacttgttgcaattggtggagcctggggttggactttatttggcttgatctggggcctaaccatctttggcatcatttactacatcttcaatcgtggtaaacacgtcatacttgatacaatcctctatgttgcaatgggatggttagttatcttgtcaggatcttatttatatgttcgcttaagtccaactggattctggctattagttagtggtggcattgcttacacaatcggcgcgattctgttcagtatgcgcaatgttccctttatccatactatctggcatttatttgttatgctcggttcaatcttaatgtacttttccgttttactttatgtttaaaaaatgtagcagttgaattctgctacatttttctttctattcaattgtagtcaaatagctttcaatcgcttcttgattattctcaacttcacctgaaacaactaactctcgaattttattcaaagtctgccccaattttgcacctggtcgcatcccgcgatctattaaaaatctcccatcaacggctagttccgacgcttttttaataggtaaagccatataacgatcaactaaagcttctgaagaaattggttgaccaacaatatgagcaacgtcaatcgtattaattaatgtctcttcccctgctaagaataattcataatcactaggagcatgactagaaagtaaatcaaatagattaataattctttcgacttgctcagtcatagcattagagtttttccagtcacgcataaaacgatgaatttgttcattcggtaatttcaatagcaaaattatcagtgaccacaaactattttccatcgttggactgaattttaactgtgggaaaatagctagttgatctttttttccgccaaaatcaggtacatcttcactcaaatttgtatcaagaaaaacctgaaaagcttgccgagcatgtggtcctaaacctaattttacaaattcttctcgaattcgttcaactgaaatttttttaagtaatttatgattatccttaattgcctgttgggtcttgctttctaacttaaattcaagttgactcataaaacgtacggcccgcatcattcgcaaagcatcctcgtgaaatcttttttctggatcacctacagcacgaatgacatggtttttgagatcatctagtccgttaaataagtcaacaatttgccctcgtgtatccattgccagagcgttaatcgtaaagtctctacgctttaaatcttcatctaagttttgaacaaatgttacatgatctggacgacgaaaatcttgataacccgattctgttctaaaagtggtaatctcataactttcaccaccataaaggacagtcaccgttccatgtttaattcctgtatcaattgacttatcaaataactcttttacctcttctggataagcactagtagtaatgtctacatcatgaacatgacgatgtaacaaaacatcgcggacagaaccacccacaaagtacgcttcaaagcctgcattttctaatatctgtaacacgggcattgccttggtaaaaatttctggtaaattatctatctttatcatattaaaatctcaattcttattgtctttattattacttttgctatacactttgttaaaattgaggaaagacataaaggaggtaatcattatgcgtaagattgacaaaagtatcttaattgatatcctcatgatcgcgctaggctgtgctatttccgctttaagtctagacatgatttctgtccccaataaactagccgacggcggactaagtggtatttcacttcttctgcggcatttttggggcatcaacatgggactatcgacccttgtattgaatattccactaattttgttaggctatcgctttatgggcaaacgtcttttagcctatacaatctggggaacgctcagtctttcctttttcttatggttttggcattcagtacctattataaaacaattagatttagaacacgacctcttcctttcagcaatttctgctgggttattgtctggaatcggattagggttagtatttagatataatggtacttccggtggaactgatattattgcccgaatctgtcagataaaatttggtatttcgtctggcaaaatgcttttagcttgtgatgcaatagtactcttcgcatccctatcttacctagacatcaagcatatgctatacacattattagcttcttttgtcttatcccgagtaatggataccgttcagcaaggtgcatacacagcccgtggtttattaattatctctgacaaatatgaacaaattggcaagatgattgatttaaaactaaatcgtggtttcacatatctaaaagctttaggtggctatcaacaaaatgaaaaacgtgtaatttatgttgtagtcgcaccgcgggaaattccatcaatcaaagctttaatcaagcaagaagatccacatgcttttgtttcaataattgaggtaaatgaggcaatgggagaaggatttacttataaaaaaccacatcgctttttcatccacaagtaaaaagctataccatgatgcatttcatgatatagcttttcttttactaataattaataattacagtcaatacgttattagctttaacgtattcgttttctccaatttgaatgaatggccgttcatcaatttctttatggccaagatttttaactttagagccttgtttaacaaacttacctggaattggctgaccatttttatcataaacatatgatggatgcttaatgcggttaattgtctcggctgtgtccttaatgtatggtaaaaatgccccttccttaacgaatttattcttaccaatcttcacaaaattattgccattaattgatttaatgcctaggatcttgtaaacacggcccttttttaaatgtccaactttttctcctttacggttaaaaatcgttgcttttctagtcaagtttaactttttaccctgacgaattggattagttgtagctgcgttaactgtctgagcagtcatcgcacctaaacttaaggaggctaagactactcctgccatatacataatttttttgttcatcatgatctcatcccctaatcattacttaatcttcttacctatattttaacaaaaaatgcagaggttatacacttttctctatttttatttatgggatggataacacttattctttgcaatctttcatggcaagaactaatcttagcttgtaagcgtttgtcaatatcaagcaatcaagaggatgaaaacaatgccaaaaaacagttactcccaagaagctttcgttcatgtctatttacttcttgggaattaatggggtaattgggtccggtgcctttttaatacctcaaacaatctataaagatatgaacttgatgagtgttttcataacaatttgtgctgctcttacagtaagtatggttactctttgttatgctgacttgtcaagtcgttttactggatcaggcgcagcttggctttattcatatcacgcctttgggcgatttactggctacgaacttggaatatatacttggtttttaggatgctgtacatatgcggcagaaatagtagctttgttaactattttaaagactttgtcccctgtttttagtaatcacgctgttcactacgggatagctattggaataattgtgctaattgtgctgtttacgattattaacttatttggtcggacaattgtaaaattagtcgataacttatcctctgctgccaaaatgattactattctgatttttatcatcattggtgccttttttattcataaaatgaactttacacctgtgattcctaaagcagcaaccctaggtgttggtccttacttcaaacattttggtgctgcatttagtgtagtattttacatgtttactggattctcctttattccgattgccccaaaacagatgaataatccagagaaaaatattcccaaagtattgatctcagtgatgatcactgtgactattttatatgcattaatgatgttagtagctatcgggattttaggatccaagatggttaattacagtacgcctattgctgtagcctttcaaaaggccgttggtgattggggctacgttctagtgattgcagggatgctgattagtgttatcggcgttgcttttgcaggatctttcaatactccatcgttgattgcttctcttgctaatgagcacgcaatgttacctaaatggattggaaaaaagaacaagcatgatgctgcttgggtagctattttactcagtgcaatcatcactatgattttaatcacacaatcatacctcttcttggtatcttgcattgtattggcttcatttattcaatatgtaccatctatcttagcagtaatcaaattcaagcatactaatgaatttccaaataacggttttaagctcccattcggctatgttattccagctttggcattaattatttcatgctacatggtaaccaatttcacttggaaaactattttggtcggaatagtcgtaggggtattagccgcagtagcttacttcttcattgaaaaagatgaagaaaagcatcaaaagtatttgtcaaaaatgcgtaataaataattttcaagttataaggacgatgactagaaactgtcaaatcttttgtgtaaatagttctttctcgtaaattgattttttaattatttatttaatcaaagtaggattctaaggtgtcctgaacctgaccaaagcctttatgaattcgattgaaataacggtcattgtagctcattgcctgaataccaataaaagcatcaagcgactgttcagttggaaactctgccttaggcttagctttgcgcttgatcacattgttaaatgattcaatcatgttagtcgaataaattgaagctctgatctgcttgggatagttataaaagaccagcagatctggttctatgtctttcaagcttctgataacatggctgtaaaccttgccccatttggtatagaagtcatgcaggacagctgtggcttcttctttgtttgtctgttgatgcacctgtttgaattcgttcatgatcttttcacgatcgtcgacgcgtactttagcgcagatattgcgcatgacatgaaccaaacagcgttgaaaatgagctttaggataagtcctggccaaggctgttttcatgccaacaacaccatcagaaagaaaaagctcaacttgctttaagcctcgggatttcatgttttgaagcatatctgtccagacttcaatgttctcgctaggtgcaatgcagtagtcaatgacctccttgtgcccattaggcttgatgccaatggcaatatagactgcttcacgctcaaatgtttctcggcgcaaaggaaggtatgtcgcatccaaatagacgcagaaaaacttgtcgcttagcttgcgtttgtggtaagcctcaacctttggaatcatctgcttggaaatatttgatacctgagctggactgtaatggctgccatacatcttttcaattagatcggctatttccctggtggtcacgcccttggagtaaagcttgataatcatgctttccaagatatccgagtgctgcttgtagccaggcagcgtgtgctgatgaaactgaccgttgcgatcccgaggcacttgcacttcaattgggccaaattgcgtatcaactttgcggaaataagcaccatttctagagttgccagtattccagccatttctggcatagggatcatagcccagaaaggcagtcaattcagcttctaacaagttattaacagcctgttgtagctctttgcgcaataaatcatttattttgtctggattgaatagagcttgagcaaaatctttggtaaaatcattcatgaaggagttcttctttctgtatgtgtttttttgttcaaaccaatcatacgagaaaggaactcctttttctaatgtttaaagaaataaatttaaggaatcattcatccttacacaaactattttacagtctcgatgactatccaatatcgcccttattttttgatcaattaagactttttagtctgcttttaaatctatttttcaacttatacattatgaaagcccatctcctcttaataatatttagtgctaaactgttagatagattagtattagaaaagagcaacaacaaatgagtaatcagaaagctaaaataaataataccgaaattaaaactagagtatctcacttcagaccaagccagtaaaaaaattcaagttaacataaaaggaaaaccatatgtctgaagagataattaacacagtcacaacaaaaaatgattttaagagtgcattaagaaatgcgggtattaaagatgatgataccgtattagttcatactgcactaagtaaattctattacgttcctaatggtccagaaaccattgtcgaagccttaaaagaagctgtgcctaatggaacaataatgatgccctcacaagtttctacgaattgtgatccagccacttgggaatatccaccagtacaaaaatctttgattcaagtagttaaggatgctatgccaccttataatcctacaacatcaatgacagaaggcttaggggttacgccagagtatttcagaactttgccagatgttgttcgaagtacccatccttacttgccaattgctatttggggcaaaaacaaagtaaagattgcacagaatcaacctttaaatattccttatggaattgacagtcctttagattatttgtaccagaataatggcaaaactatctttttaggcactgattatgaaacgtgtacagttttgcactatgcagaatccacaattggtagaaaaaccgaaacatgttctgctgcaactagtctggatgaaagcggcaaaactatttggactgaatatcaaaatattgatatggattcatatgatgactttaatgaattagggacagagtttgaagcaaagcatccctctgctatcaaaaaggttaagttaaacaatggtgtcatcaaagcaataaatgtaaaaccgctaattgattttgctagaaaatggtttataaaaaaagacaataatcattcaatttaataataaaaggaagaagtcactttcaacttcttcctttttctttatttaatctttgttaaaacctttgcacctatatttaaacctacactatgcgatttaccgccccaatcacgttcatcataattatccatatcagctaaagtatctgcagtgaaaagaaattgtgcaaaatcaatctttctaaactgagcacatgctgctaaagctgcacattccatttctacagttgacgcgcctaactgacgaaattgtgccacttttttaggcgtttctctaaagaaaccatctgttgtccaagtcgttatctcgtcatattctatatttagctcaactaaaatcttttctacttccttcaaaaatatagaatctagttccacaagttgtccaggattcatatagtgaaaagatgtcccttcatctcgaattgcacgtgttggaagtagcatcgcattttcaggtaaatctactaaggcacctgctgttccaatggttaacaccttttctactccataagcaattagccattcaagcaactgtacagctgccggtgctcccaagggcgcttgacacaaagtgaaaaattcgttattaatttgaacttcataaattttaggattaaaagaacatgactcaaattcacctaaagtacggtgaaaatggtgatctaaaaatgcattaatttctttttccggcacgaatgcgtaaagcaatcttggatgaaaatgaaatggttcttgatcgtgatttggttcaagaaccgcatgaggatgtttgtcaaagtctaaaatgaatggttgtttgttcatattttacactccatttttagttgaaatattatcataaactcgctaatacctgagatccaatattcaagctaacgctatatgaatcatggccccagttacgtttatcatagttatccatatcagctaaactatcggcagtaaacaaaatttgtgcaaaacttatatttctaaattctgcacaagcagctaaagctgagcactccatttctacagtttttgcacctagttttttagcttgcaaaacttgattaggtgtttctctaaaaaatccatctgttgtccaagttgttccctcttcatattggaaacctaaattttttatttcattctcaactcttcttacaaaatttttatctaatgcaataatcttacttggttctttgtagtaaaaagatgtcccctctccgcgaatcgcttcttgagggacaaacatcgtgttttcaggtagattatccaaagctcctgcgtttccaacagataaaacttgtttaactccataattgatcaaccagtctaaaaactttgttgaagctggtgctcccactggagcttgacataacgtaattagttgattattgacttccacttcatatattttaggtctaaacgaaacagttttaaatttgcccagagtcttatgagagtgtttatctaaaaacgagttaatttcatcatctgggacaaatgcaaaaagcaatttttcatgaaacttatactctaaattttcgactccaggttctattacagcttttttacttaaatcaatatctaaaacaaatgatccttcattcatatacgcgtggtgctagttaaatcgttctagacaataagccaaattataagctaaaattgcaatttccaaccggctttgaaagcctatcagactacgtgctcgattgttctcggcattgtaataggtcagaagcgaaaagtcgctttcaattgttctgcgaatagccatcaattgatgatcattgtgctttttagctcctgtcatatttttacgatatggtgtccaaagttcgtaacccatttgttttagctgttgatgcagttctttgcctaaatagccttcgtcgccaagaagatagtaattagatggatgggtattttctatcagttcaactgtctccctggcatcatgaactgatgcctttgttacgacataatcaagaatgtaaccgtcatcgctaacaatggcatgaactttgaaaccatagaagtaaattttcttggtggccttataaccaatgttggcataaccgcgaaaaattttagcacgatagtttcgaattggttggcaaacaggtaccggaaagctgtcaatgatcaagaactgtccattcaggtcaacctttttattcatttcttgccgtatctgataaatcaattgcaatagctgacgtgaacgccgattaaaacgtgagtgtgataaacaattgaaacattcacagaatcttctttgtgattcaattcctgtcttagcttgccagataagtaaagccaaaatcagactgtccgtagttttaatttgatcaatatttcgccgatgagtaaactcagccggtgcatacaaacgataccagtgccgacaaattatcactaaatctttaaaactaacttgtaaatggtggctaaaacgcttaagcttaaggcagttcaatcagatcagactcttttctattattactatttacaagtcgagtctaacaagattggacttttttattaactaaaacgatttaactagcaccacgcgtattcatatatattctcccttaatcaataaatggatagtcttcattaaagtaatgatcaataaaaatttgatgttgcttgttaaaaatcttggataatttatctttagaaaaatacttcagatcaagagtttcagagctaatctcttttgacattttttctactaattcaacagttactgcctgtgccacatcttgattaggataatgctggataaaattagttgaaacgcctaatagtgacttagttcttacttttaagccagtttcttctaaaaattctcgaacgcatgcttttggagctgattctccaaattctaaagcaccaccaggtaagccccatgcattaaaatctgatcttttttgaagtaagatttcattcttgctattagccaaaattccaccagcaaaatttagaataattggttcatgaccaactttttggcgtaaggtcttaatatagtttttaaccatcgctagtcctctacttgaatatcattcatcacaatttcaacttcatcgtctaaattaatctgactagtaaaagcatactcgggaataaaaccaagataatctttttcattccaccatgagcgcattgtttcttcaccaaaagaatgttcatgacgagttttatggcgtttcattgtttcttcaaacggaatatcaaaataataggcataaatttgatcaccaaaaagctgctgagattttttgaataaatcagcataccatttcgcattcaagataccttctaaaatagtgtaagaacagtgatgataaccatactcaagcaagttttctaataatggcaaagcaaatgtcttttctccgtctttaacattcagcatttctcttctaactgtatcttgtggaatcaatagtgtattgtgtggcaatcgacgatggatttctttagacagtgtagttttgccactgccagagtttcctcgaattataattaattttgatgtcatcatagaaatcttcactttcttaaaattaattcactgcatctctaattgttgcaaacttatcaaatgtataatctattataatctataccatgaattttaacaataggcagcattttccctttttgtcccatcaataatcctgcagaagcggctagcatgtcacagatagtttcaacattagttttatcttgatactgactttttcttaaaccagaaacaccatacaatccaattgctacttgagttgcaccttttttatcaattcttccatcactatcggtaattatgatagctactctgacttttaattgatcaaaaatatcatcactaattctcttagcaatttcatcacaatttttaggtaaaactattgcagtaccagcatcaattttatctacacctgcactagttaaaaacaaaccattcggcaaccacccaccaataaagttcttagatatctttagtttcttaccactcttatcttcggtttgatcaattataatctgaattagtcttggagcttttctaggtatttgctgatgcaaacgtaaggctaattgacttggattaatagaatttaagtgaacaaacagaccttcagatttagaaatcaatttagaagcaatacataaaacatcattatcgcgtatattaaatccttcatttttgattgtcctaattatttctgcacttaagttgcactttctctctattttcggaaaattatgcagcgcttcaattgtaatcatgactataacctcaaatcagatgttaatttgcccaaaacagtaatttcgtttctatcgcaatacttcaatgtttttatgatcggttaccatgatttatctggtatctttctcctttattaatggtattgttagcaaaacaacaccaaaatacactgcggatacaaaaaaacattacttttaagtctccaaatactttcataatactattgcttataaataatgaaatactaaccaagatctctgcaataaatgaaacagttgaaagcatagtcgacttattgctttctccataaatggcttcattactagtagctgaaatttgtcccgacatcattcccatcaatagttcaattaatagaaaaaggcaaagcagtaaatatttattttttagagtaccacttaatataaatgctccaatcatacttccagtattcaacaaagtaatcccttttgaattaaaggaagtagaaattttactaaataaaatcgaagagactgtaaaatattttgtgtaaggatgaataattccttaaatttatttctttaaacattagaaaaaggagttcctttctcgtatgattggtttgaacaaaaaaacacatacagaaagaagaactccttcatgaatgattttacaaaaaatatagcacaagctctattcaatcaagacaaaataaacgatttattgcgcaaagagctacaacaggctgttaataacttgctagaagctgaattgactgcctttctgggctatgatccctatgccagaaatggctggaatactggcaattctagaaatggtgcttatttccgcaaggttgatacccagtttggaccaattgaagtgcaagtgcctcgagatcgcaacggccagtttcatcagcacacgctgcctgactacaagcagcactctgatgttttggaaagcacgattatcaagctctactccaaaggcgtaactaccagagaaatcgctgacttgattgagaaaatgtatggcagtcattatagtccagcccaagtatcaaatatttccaagcagatgctccccaaggttgaggcttatcacaagcgcaagctaagcgacaagtttttctgtgtctatttggatgcgacataccttcctttgcgccgagaaacgtttgagcgtgaagcagtctatattgccattggcattaaacctaatggacataaagaagtcattgactactgcattgcgcctagtgagaacattgaagtctggacagagatgcttcaaaacatgaagtccagaggcttgaagcaagttgagctctttctttctgatggtgttgttggcatgaaagcggccttgaccaggacttatcctaaagctcattttcaacgctgcttggttcatgtcatgcgcaatatctgtgctaaagtccgggtggatgaccgcgaaaagatcatgaacgaattcaagcagatacatcaacagacaagccaaaaagaagctgcagctgtcttgcatgaattttatgcaaaatggaataaagcttatagccatgttatcaaaggtttgagggaaattgagcccgatctgctggtcttctacaattatcccaaacaaatcagagcttcaatttattcaaccaacatgattgaatcctttaacaacgtcatcaagcgtaaagctaagcctaaggcagaatttccaactgaacagtcgcttgatgtatttattggcatccaggcaatgagctacaatgaccgctatttcaaccgaattcataaaggctttggtcaggttcaggataccttagaatcctattttgattaaataaatgattaaaaaatcaatttacgagaaagaactatttacacaaaagatttgacagtttcctgcaatttgttttggatattcaaaatgtatatagtgagattcgcctaatgttataactttagatttaggattatttgaagtgtattctgaccgcttatattcattttcacgatacttttctgtaataacaatacttggtgttttatcacttatcctggtagtatttttccaaaacgaatcattttcgtaggctgcttgtgcgtttaaattatccttttcatcaaatttcttcgcattttgctctgtagttgtccaaaactttttattttcttctggagtaaaaatttctctaagatcagcttcaattttttcttgaagttttgccatgtttttatttttctcaatataagctggttcctttggaggatttaacatgatttctctagtagttggctcaattcctacaaaagccttcaaattattgattttatctttcatttgcatagcatacacaccgccaatgctatgagccaaaattataactttttttgcattaaaatcgttaataattttagctaatttagtagcttcgtctgatactgtatagtcctttaaagacttgccactaaagccactattcaaataatctgatgcaaaatagccatacttattgggcaaagcttcaattacttttgaaaaagattgtgctgtatcaaaactaccaaagccattcaaaaaaacaactaatggatctccctttcgataggcaaaattaatcttgcctaattcagtttcaatatcgcttctttgcataaatttctccctttattaaaactttgaagtcgttatattttaattatttcttagcacaaataccttatgcccattttcatcatcttttaaatacacgaaactacttcgcttagctacattctgactagcggaattcttaggatgagttcttaaaatcaaataatcaagcttcaactgttcaaatgcgtatttcttaagaaattcgacagattcagtcataattcctaaatgttgaaaatcattagaaagccaatatcctacttcgccagattcatgattcaaattatgtaagtcaatcatgccagctggctgtccatcaactaaaataactaggttgaatgctgtaccatcaaccattttttgttgaaacattttaattgaatcggcttctttttgaacagaatcaattttgttggcccaaactaaccatttagaaaactcagtaagatttttttgaagttgatcaaataagtcttttgcttgccaagtctctggaagaactaattcgatttctttatttttagttagaaatttatgtaaaacaaaagcagtatgacacatttcggaaactgtcaaatcttttgtgtaaatagatctttctcgtaaattgattttttaattatttatttaatcaaagtaggattctaaggtgtcctgaacctgaccaaagcctttatgaattcgattgaaataacggtcattgtagctcattgcctgaatgccaataaaagcatcaagcgactgttcagttggaaactctgccttaggcttagctttgcgcttgatcacattgttaaatgattcaatcatgttagtcgaataaattgaagctctgatctgcttgggatagttataaaagaccagcagatctggttctatgtctttcaagcttctgataacatggctgtaaaccttgccccatttggtatagaagtcatgcaggacagctgtggcttcttctttgtttgtctgttgatgcacctgtttgaattcgttcatgatcttttcacgatcgtcgacgcgtactttagcgcagatattgcgcatgacatgaaccaaacagcgttgaaaatgagctttaggataagtcctggccaaggctgttttcatgccaacaacaccatcagaaagaaaaagctcaacttgctttaagcctcgggatttcatgttttgaagcatatctgtccagacttcaatgttctcgctaggtgcaatgcagtagtcaatgacctccttgtgcccattaggcttgatgccaatggcaatatagactgcttcacgctcaaatgtttctcggcgcaaaggaaggtatgtcgcatccaaatagacgcagaaaaacttgtcgcttagcttgcgtttgtggtaagcctcaacctttggaatcatctgcttggaaatatttgatacctgagctggactgtaatggctgccatacatcttttcaattagatcggctatttccctggtggtcacgcccttggagtaaagcttgataatcatgctttccaagatatccgagtgctgcttgtagccaggcagcgtgtgctgatgaaactgaccgttgcgatcccgaggcacttgcacttcaattgggccaaattgcgtatcaactttgcggaaataagcaccatttctagagttgccagtattccagccatttctggcatagggatcatagcccagaaaggcagtcaattcagcttctaacaagttattaacagcctgttgtagctctttgcgcaataaatcatttattttgtctggattgaatagagcttgagcaaaatctttggtaaaatcattcatgaaggagttcttctttctgtatgtgtttttttgttcaaaccaatcatacgagaaaggaacccctttttctaatgtttaaagaaataaatttaaggaatcattcatccttacacaaactattttacagtctcgcctgcggcatcatatcttgaatctgcttcttggcccgctttaatatttttcccggccatttttaccaaattgcccacctgcatatggctaatattaaagccagacaggcaattgactgctagagcagtattgcgataagtggcaacgctgcttacttctaagatgtttttgactgctaaaatactgtagcgcttgtatttgtcaaagcccattaattcatccaagggataccttgcttgtttgcctgggcagacatatcttcttctgacatacctaacttcgccaaaagccatattgattgagcgctcattcttcttatcaatctgatagccctgtgctttaaccttggtaatcatttcatcatcaactttagctaaagccaaggccatgatttccttaatcaggtttaagaagaaacagattatttttctttcacgcttaatataattatcttcagactttataatatttgcgatttcagttacaattgaattcataaaagaccagcttctaatgtgttttttgttcttaacatcagactactggtctttttgtttgagctcaagtccaaattcaaaggacttgggcttttttaattatttattcaacttaccgtaaaaaattatacacttagtgacgaaatttttgctattcaaagtgctcaaaaagagacgcgtaatcgttatctaaaaaaacaaaaagctatgttggcagaacatgatcttttacccgaaaaaaagcgcaaaccacgtgcccgcatgttatcagagctgaatttaaacaacgatgatgctattttaacttttgccaataaagttaaggttttcaccagtggacccgagttgtttgaccaaataattgctgatcttaagcaagctaaaacatcgattagtttagagttctacactttttataatgataatctaggaaagcgtgtcttacgggccttagaagaggcttctgctaaaggagtaaaagtcagagttatttatgatgtctctggctcacgtggtactaaacctgctttttttaatcatttaagagagcttggtggcgaagcacagcctttcatttctacttctaaaaagcattggtttactacaccacgactaaattatcatttacaccgcaaattaatcgtaatcgaccatcatattggctatattggtggctttaacatcggtgatcagtacgttaatcaatctaaaaaatttggtcattggcgcgatacacatttacgtgttgtgggtcaatcacctatcctaatggagacacgctttgccatggattggaatacttctatcagacgaactgcattacctaaatttgatctaagcgaattacatgcttttactgtcgaacgtaaagatcttgacaacgatgataacgtagcaatgcaaatcgtttcttcaggtcccgataaccaacattatggcattcgccgaggatatgagggcatcattgctggggctaaaaactatatctatattcaaacaccctatttaattcctgaagaatccattttagaagcattaattattgctgctaatagcggtgttgatgtacgcatcatgatcccttgcatgccagatcatccctttgtttaccgagctaccgaatattatgcaaaatatttagttgctcatggcgttaaaatttacaaatataatgatggcttcatccatgccaaaacaatggtttctggctccaatatctcatctgttggttcagccaatcaagacttcagaagttataccttaaacttcgaggttaacgcttttaattacaatattcaattaactcaagaacttaaacaaatttttgaaaaggacctagctagttgcagtcttctaactaatgaatactttaatcagcaatctaaatggcttaagtttaaacaatacttttcacgtctgttggcacctattttttagaaataataaaaccacgaagcaaaaacttcgtggtatttttttacagattattataaagatcctgcatttcatcatcttctggagctaacttaagatatctttctagcagttgttttgttatttcatcattattttgtacattaaaaaagattatcatttggcgcaaaaagtctggattatccttgaaatccggataagctagtaaaaattcgctctgtgctttctgaatatcatccaaatcctcatatgataatgccatattccaatgtgcctgtggctccacgctttcctcatctaagttactaaataaggcaatattctccttagcctggtgttcatgaacatataggttagatagctgcatacgtaaatcactattgtctggcgctacttttaaccccttttcaagtaagtcacgagctgtatccaattcattcaaattagctgctgcacgtgctcccattgaataaagtgtttcatccagttcattgtacgctaatcctgcttgagcagtcctcaatacttgttcattgtcatgctgatgatcataagcttgtgctaataatggatacgcatttacatagtcaggactttgctcaatcacttcatctaagaacttaattgcctgcttatcatcacctacagataagagaactaatcctgcttcatacttagaatcaatatctaaaatactatttgcatgttcacgaataactttggcagcttcttcataattacctaatttggcaaaagtcgcaaataatctttggtacagatttacttcactaaaagtactttgacgtttgattaaatcttgatataactcaagtgcttgttcctaattaccacttaaatattcaatctctgctaaaccaaatttaatagcatcttcttctggagctaattgtagtgctcgtattaatttgtccttagctgtttctattaagccgttagtttggtaataatcagcttgtactaatagactatccaaataagctgaagagctctcagggacattatataaaagcgacagaccatcgtcatcatcgccatcatttaacataatctctgccaagtaaactttaaataaatcttctttaggaaatttagctattaaagctcgatatatttcttttgctaaatctgtaaaacctaagccagttaggttttctgctaaagatgacaagacctcgggagcatcattatctaaagcttcttttaaaaggtgtttgttttgtgaaaaatcatgattttgaattgcatctagtaattgttcagaataactcataatacctccaatcaagttaccattgtactaaaaaaagacgccggaacaaagtccaacgtcctatcacattagttaagctattacttaacggcatccttaagagctttacctggcttaaatgcaggtacttcactagctgggatttcgatttcatcaccagtttgtgggttacggcccttacgagcagcacggtgacgtacttcaaaagtaccaaaaccgattaattgtaccttttcacccttagcaaggttttcttgaattgaatcaaggatagcatcaacagtatttgcaacttgcttcttagttaacttagtttttgaagcaacttctgaaactaattcagccttatttgccatgaataattcacctcctgaatttgaacctaatgttcaaaaaatttttctttgtttaagctaaacaaggaaaaatgatcacaactaatcatgttccctaaaaacaaaaatatcacaaaaaccttataacaacaaggttttttatgatattttgcttatcttttatttacgtttacgtggtaaaatcttgattggtgtacccgtaaaatcaaagttttgtcgtaattgattaatcaaaaatcgttcatatgagaagtgcatcaattctggatcattcacaaatacaacaaaagtcggtggattcgtacttacttgggtcatgtaataaacacgcaatctcttacccttcaccattggagttggaactaacttacttgcttcaagcaacaaatcatttaagacactagattgaattctttgattttgattatcatagacttctttaaccatattaggaatttgatctaatctttgacctgtcttggcagaaacaaaaagaataggagcatagtccaaatattgaaattcatctctaatttcacgttcaaattctttagcgcttgtactattctttttcggcaaatcccatttgttaacgacaatgatgattccacgacccgcctcgtgagcatatccagccacatgcttgtcttgttctctaatgcctgtacttgcatcgaggacaagtaaaaccacgtctgaacgctcaatagcactcatagcgcgcattacagagtacttttctgtcttctcatacactttgcctcgtcttctgattccggcagtatcaacgaccttaaattttacaccatcatgagtaaacggcgtatcgacagcatcacgagttgttccttcttcattagcaacaattacccgatcttcaccaagtaatttgttaacaattgaagacttacctacatttggtcgaccaatcacgctaaaagaaataacatcatcagcttcagtatctttatcgtcaggaaaatcattaacaatctgatcaagcaaatcaccaataccagtaccatgactacttgaaacaggaatcggatcccccaatcctaaactatagaaatcataaatatcgcttcgctgttcaggattatcagctttatttacagctaaaataactggctttttagtacggtaaagaagatgagctattctttcgtctaaatctgtcacgtgatttaccacattggttaacatcacgataacatctgcttcttcaattgcaatttctgcctgagctctgatttcttcctcgatcttgccaccttcccaggtaataccaccagtatcgatcaaatcaaacttatgccccatccattcggcttgagcataattacgatctcgggtaacaccaggtttgtcctcaacaatagctaaacgttgattaattattctattgaaaagtgttgatttaccaacattgggttgaccaacaattgcaacaactggtaaaaccatttctcgccctcctttactaatctaaacataaataaaaaagccgactcaagtcggcttttttataaaatgactacttacggtcctttaattggtcaccaatgatgtcacctaatgcaaagccgttgtcgttatcactcatgtacttcttgtttactgaattttcgttacgtgaacgacgtggacgagaattatgattttctgaagaagcatttgagtcagcagccttgattgaaagtgagattcttctatcacttgggtcaatgttcaaaaccttaaccttaacactttgaccaacctttaaaacatcgcttggcttgtcaacatgcttgtttgagatttctgaaacgtgtaccaaaccttgaataccatcagcgacttcaacgaaagcaccaaagttagttaatgactttacttcgccttcaaaaatatcgccttcgtttaagtcagctgtagcttgttcaaatggagaaggttcagtttgcttaatagacagggaaatacgatgtctgtcattgtcgataccaatgaccttaaccttaacatcttgaccaacctttaaaacatcgcttggcttgtcaacatgcttgtaagaaatttctgaaatatgaactaaaccgtcaacaccaccaacatcgatgaatgcaccgaagttagtcaaacgtgaaaccttaccttcaacaacgtcaccaacaactaattgtgatgcaaccttgtcaaatgcttcttcacgttcttcttcaactaaatccttgtgtgaaaggattaagcggttcttgttaggatcaatttcggtaatcttaagtttcatagtcttaccaatataaggcttaagatctgaaacgtaacggtttgaaattaatgaggctggtaagaaaccacgtgtaccaacatcaacaattaaaccaccacgaactgatgaagttacagtaccttcgacagcatttccgtcttcgaagtctttttgtaacttgtcgtaggcttctctttcctttaagcgggtaactgagaagaagaattcaccattttccttgtcgccaccggctcttcttaatactaaggccttaaacttgtcaccaggcttaactaaatcacgtaagtctgcgttacggtctgaagtgtattcacgacgagtaatgacaccttcaacaccagcgttttcaacaccaacatcgatttggccgtcttcaatgtctaatacttcgacatcgacaatatctccgacctcaactccttgcatttgctttaatgcgtctaaaaattgattactgttttctgacatatgtacctcccaatatcatgtcccattttataggaaaccgagatatttttctactattttgtgctattttttctaatttttttgttttttttcgatttgagctaaaattgcctctacaacttcgtcaatcgacatgtttgtggtgtcaatttcaattgcatcatctgccttttttagcggtgaaattttgcggtgagaatctttataatctcttgctgcaatatctttttcaatttcatcaactgtttggtcagatttaataccacgctctttaaaatctaataaacgacgttcagcacgtgatcttgctgaagcaactaaaaagatcttaacttcagcgttaggtaaaacagtcgtaccaatatcgcgaccatccataatgacatttgtcttgcctgccatttcacgttgcagacttaccattttttctcgtactttcggcaaagcggatacttccgaaacattagctgaaatttcaggcgttctaatttctttagaaacgtcctttccagctacatatactttttgctcaccattttcagatttcaattcaattccatcttcatcaatggcattcaagatacccgcttcatcaccataatctaagttatgattacgagcaatcactgtacatgcacgatacattgcccctgtgtctatatagacaaaggataatttacttgcaatgattttagcaactgtacttttacctgctgatgcaggaccatctactgctacttgcattctaataaaaaagagatcttatcatcgaccccttttatcctttctgaaagattatttcaacttaagtgtctgacctgcttcaatatttgaagagtctttaagattatttaatctggctaattcatcaacagtcaagccattcttttctgcaatttcatttaaagtatctccactttggactaaataagtcttaggagtagcagaactactagatgagcttgaactagccttttcagactttttcttgctaaaagaagatgatgaggttttcttagtcttaacagacttggatgatttagaagaaaccttcttaactgtttgaacttcttcagctttttctgaatggcttgaagccaaacgatgaacaactgggataagtgcaattaaaataaccgctaaaattataataactgctatccaacgtgctgatccactaggctgactatcttgtgagcttcgcttttcagtaggtcgttcatagtgctgatatggcccggttgactttttatccatcaaaaattcctccattcacttaacggattaattttagcatattttaggatgctttgaatatgaaaaatcccatcaacttaaaaaattgatgggatgataacttaattcaaattaaatctcttacgaacgaatggcttaattgttttcaaggtagcttcaaacaataagtaaacagccacagcgttaattaatccttttaacaagttaaagggcatgataatactaaaaatgtaggttgacattgatggtaaatgcaataactgacccaagtaaactttctcagtaaagcttaacaaggcactatagctattaatagcaggcaagtttggtaccgctgttactgcgtaaataggagtcaaaacgaaggcattagccaatgacatcactgctgccattgcgataatcccaattaccaaaccacaaattggtttaactctgcccatcattgtcttgcggttatccgcactcacatttttacttaataaataaaatggaactgcaaatgacattgaagctaagaatgctgctagatttccaacaaggcttggtaatgcaaaaccactaaaaattaaactaagtaacattcgaattaaagcaataataactcccggtacaatgccaaaaataaacattccaattgtaataatgacatctgaaaaatcaaactttaagaaggcaactccaggcatgattggaaattcaaatttcataactacaaaagcaatacagccaattaaagcatatgcaatcacattagttaaactactattcttggatttagcttgatccataacttactttcctttcccaaaacaaaaggtctattgcttcagcaacagaccttaaaaagtgtagtaagtttttttagcctgtcttcttccatctagactttaactatcggtatctaacgattcaaccactgacgtgggtcgcggactttcaccgccggtcgggactttcaccctgccctgaagacaataaccttgaatatttaattacagttataatttagttcaattgcattaatttgtcaacttcatgcttcgataattcccgatattgccctgatgtaagcgaatccagagttaaaaaggcatatttttcacgagcaagcttatcaactaagtgacctactgctttaaacattcgcttaacttgatgataatgtccctcatgaattgtaatttggacaatttgtgtgtctttcttatgatcagttttcaatactttgaccttggcaggcgcagccttaaaatgatccaactttactccttgagtcaaggttttaatttcatcaggagttaaaatccctttaatcttggctacatagaccttagccacttcatttttagggtgcatcaataaatttgctaatttgccatcgttagtcattagcaataaacctgacgtatcataatctaatcttcctactggatacaaacgatatggtaaatcttcgaaataatcaactacagtttttctaccacgatcgtcttctgcagtcgaaacaacgccacgaggcttataaaacaaatacgtgtgtaggctttcccgctcaattggctcatcatcgactgtaatattactaaaagtatcgactttagtacctagcttagtaacaacatgcccatctactttaactcgaccggctacaatcattttttcagcttttcttcttgaagcgattcctgcttccgcaattactttttgtaatcgttctgccattttctatccctctttttctaaatgtttgtctgcgctaccttttgaatcgaataagtcaatctcctcaccatcagttgtatcctcaaagtcttcgattaacggtaaatcagccaaactttgataattaaaatattgtaaaaaataatcagttgtaacatacaacttaggatgacctggagcatcttttttgccgtcttgtttaattaatcctcgccaaatcaatgtctgtaaagctcctgatgaatttactccacgaatatcatcaatttctattctagtaattggttgtcgataagcaataattgagagaatttcaagtgctgattgactcaaattcttagttaaatctttttgaaaatacttttcaattatcttagctgtctgttgactagttgtcatcttataagtatttgcaatatgaattatttgcattcccgagtctggatcagccttcattttttgctgcaaacgagtgactaactgacctagctcttcaccatcaacttcaagtagttcaattagattttgctcctcaagcccattgtcacctgcgacatacaaaagagcttctaaatttgctagtttacttgccattcgtatcaattctttctaaatttaaatcaccgaattcacgtgcttgtgtaatctgaattaattgttttttacacaattctagtgtcgctaaaaataagccaataacatctgagatattctgcattttgtccgcgcaagcaaagaaactaacttgcctttttcgtttcaattgtccatgcaaaaaatccatcatctcattgatcggcgtttctgctactctaattgaagcggtatctggttgctgcaacttcaaacgatgtaagaccatcgtaaaagtcgtcgctaattcttgtgcagttatctgacccttaggcagcggttgaactttagcagtggttgatacactagcttctttagcaactgtaatcggtacttcttcattacgttctttaaaataagcagatattttcttaaacacagaatattgtaccaattgttgcactaattcgtctcttggatcttcatcaggttgaatatcatctacaaaatcgttttgaggcaacaaatactgtgatttaattcgcaataaagttgatgacatgacaaaatactcgcctgcaatttgtaaatttaagctttgcatttggcgcaagtattctaaatattgactagttatttgggcaattgggatatcataaatatcaattttttgcgattggatcaaatgcagtaataaatcaagtggtccttcaaaattcggtaattctaaagttaagttacttttgtccattatcttcttctatcgtttttaataaatttgtatattctggtacagcagttattcgtttatctggatattcgtgctttagttcatcaacaattttccgttcataactaatctcacgaaaaccaggagctaaagacaaatatctaataattacaaactgattagatacttgggttcctattacgcccaccatattattttgactattacgataaagatacaaaataaagtcattttcatcctgattaagcgtgatttcttcttttaagttttcgatatttttaaaatcaggtaaataggatagtaatcccattgctatcttctcataatcttttttatattgtattagcatttaatcacctaaagacgaggatgtgtcttctgataaacatttaaaatttgcttttgtgataaattggtatagatctgtgtcgtgctaatatcagaatgtcctaatatttcttgcactactcgcaaatctgcgccgttttctagcaaatgtgttgcaaacgtatgacgtaaagtgtgtggcgtgacatctttagtaattgccgccatttgacaatactttttgatcatctgccaaatagcctgtcgtgtaatcttttttcctcgattatttaaaaaaatatgttcatcgcttttccctacttgtaaaattagcggatcacgaacttcattttcatatttttttatccaatcaagagcaacaggactaattggaatcaatcgttctttttcgcctttaccaagaacccgaactaagcctaaatcgtcatgtaaatcctgcaactccaaattaattaattcgcttactctcattcccgtggcatataatgtctctaagatagcacgatcacgtatacctaactttcgtttagtatttggctgctcaagtagcctattcatttcagcttgagagagagctgtcggcaaacgacgttcttttttaggcaaatcgatttccaacattggatttaacttttgaatattttgccgagctaaccattgataaaatttacgcatgctagaaataagtcgactaattgagctggttgctttgttcaaatcacgctgccgagctaaaaacgcatccacatcgcttgcttcagttggccatgaagccataccttcattttctacaaaagtttgaaattcttctaaatcttgacgataagcattaattgtattatcacttaatcctcgttcaacttgactatagcgtaaataatcatcaatttgatcttttaaattaatcttctccattatcgttctcttctggatccttaattaaagtaatcgtacctgctgttttatcttcttcaattaatccagccttgagcaaatgaccgaccgcacgtttaaaagctgattttgaaataccaaagtatgatttaatttcttgtgcacttgatttgtcatagaaaggtagagtcttggtttctcttctccgcaaactcatcaaaatcatttgcgcatcatcatcaatttcttcaaaagcacgaggcaaagcactcaaattcaaacgtccatattgactgacaccgactactctacccttgaattgctcacctagtctcataggacgtggcatctgcgattcatgtacaaagccaagataataatcactagttaaaacaaatgctcctatctctcgtgtaacataaaccgttgcaaagacattttcattattcattccacgtggaaagttagcagctaattggtcaaaaatattttcatctgctagcttagcccaaatacgatctttttcgtcagtttctaatcttactaaaagtcgatcatcacgtcgaggccatctttctttttctctaggaagatcatccattgataaaacaacgtctttatcaggtagacctacatcaacaaagacgcctaagcctggacgtacctcggttacttttccccaaccatattgatcgggttgcgcgaatggcaaaaattgtgtcatttctcgatcatgacttttattatcataaataaaaccttcgacttcatctccaattttaggaatatcatcttgcgtaatctcgatcttcttcaattcataagtcagtccatcaatttgaacataataagctttatcgttttcgtcagtaatttttcctttacgaactgttccaagcatttaaaaatctcctactttacatattcttacatataagtataagagatttttatgcaaaataaaatagccagcacttaagctggctattttttgattagctaatctatctaaattatattcttaaaattaaaggtttgagattttgccttggtagatagcaccacgacgagcgtcaacagtaatagttgaaccatcagaaatcttgtcagtagcgtcagtagcaccaacaataactgggatacctaatgataaaccgataactgcggcatgtgaagttaaacctgaagcttctacaactaagcctgaagctttcttgatagctgggttgtagtctgggtcagtagtcttagcaactaagatgtcgccttccttaaccttgctatttgcttcttcagctgagttagctacaacagccttgccgataactgaaccgttaccaacacctaagccttgaactaacttgttaccgatgatttgtaacttcattaagttagttgtacctgagtcaccaagtggagtacctgcaacgataattacaaggtcgccatcctttacgtaacccttttccttagctaccttagcagccatttcaaacatgtcatcagttgacttaggcttttcagtcaatactggttgtacaccccaaacgatacccaatgagtgttgaaccttttcgtcaaaggtcatagcaataatgtcagcattgggacggtacttagaaatcatacgtgcagtgtaacctgagttagttgcagtaatgatagtcttaacacctaattcttgagcagtacgtacaactgattcaccgatagcttcagttacgtttgaacccttgtaagcttcgaatctttgaagagctaaagtattacgcttaagcatttgcttttcagtacgttcgtcaatttcagccatagccttaacagccttaactgggtaaagaccatttgctgattcacctgaaagcatagttgcgtcagtaccatcaagaacagcgttagcaacgtctgaaacttcggcacgagttggacgtgggttttcttgcattgagtcaagcatttgagtagcagtaataactggcttaccaagtgcgttagccttgcggattaggctcttttgtacaaatggaacttccataaatggaatttcaacacccatgtcaccacgagcaaccattaaaccatctgaaacttgcaaaatttcgtctgcgttgtcgataccttcttgagattcaatctttgggaagatcttaacgtagtctgcacctgcttcttcacaaagcttacggatgtctaagatatcttgagccttacgtgcaaatgaagcagtaatgaagttaataccatagttcaaaccaaacttaatgtcatcagtatccttttcagtaatacctggaaggcgaatttcaacaccaggagcgttaacacccttctttgaaccgattacaccagtgttttgagcttcacaaacaagttctctctttgagtcgtccttttccttgatcaaaaggtcaaccaaaccatcatcgattaatacgtgaccaccaacgtgggtatcatcgtataaaccgtcgtaggtaacgtggatcatgtccttgttacccttcttagtggcatccattgatacacggatcatgtcaccagtattaatagtgaacttgccaccttcttgttcagtggttctgatttcagcacccttagtgtcaaggtcgataccaagaagtaaaccagtatccttttccacttgacgaaccatcttcatacgagcaaggtgttctgggtggtcaccgtgtgagaagttgaaacggaatacgtttgcaccagccttagctaaagcagtaatagtttcaatatcgtttgaagctggccctaaagtactaacaatcttagttttcttcattattaaaaaaatcctctccaaaaatcaactaaattaatatttagtcatttcttcatttacatccaataacgcataatcaccttggtgtttaccgtcaaacaaatcaagaatgtcgtgggtattaagttcaccattctccatgccgacagctaaaccgcccttcccatcgagaagtaacttaacagcataattacccatcttagtagcattaactctatctgtaacagtaggtgagccaccacgttgcatatgcgcaaggacattagcacgagcatcaaagtcaccatatttaaggagttcgtccttaaacttatcagcagccataacgccttctgctaaaacaatgataccatgatctttgccatctgcaaaaccacgagtaagagtttctgcaatttccttaacatcgtatgaacgttcaggaattacaattgcgtctgctccacttgctacaccgacacgcatagcgatatcaccacattcacgacccattacattaacaacgaatacgcggtggtgactgcttgcagtatcacgaattttatcgatagcatccatagcagtacgacaagcagaatcaaagccgatcgtgtagtcagtataaggaatatcattatcgatagttcctggtaaaccaactgagtttacgccgtggcgagtcaaggctaaagcaccatggtatgaaccgtcaccgccaattacgataaccgcatcaataccgtgtttctttaattgctcaacacccttttgttgcacttcttcttgtgcaaattcagggaaacgagcactgtacaagaaagtaccgccttcactaatcttgtggtcaacattttccgtggtaagcggaacaaagtcacctgcaaccaaaccagcgaaaccataacgaattccaaagacttcaagcccatgatggatagcagtcttcgtcacagctctaattgctgcattcataccaggggcgtctccgccactagttaaaataccaatccgtttcatgaattcacctcatcatgattattttgtgtaatttctcacatcacataaatattaacattttttaggcaaaaaagctcacaaaaattgggctaatttatgctttctttccgtatttaagtttgttagcacttacatccatcgtcaaagatagctttgtaatttgaactttattctttaaaattaacttttcgcaaattggttaagaaatactgttttttattttggtcaaatcgatcaccttgaaccttgactcctagtaaataaatatctccttcttttaaaatagagccaaatttttcataagccggtggaaaaataataatttcttgttcgctagatgtatcagcaaaactagcaaaagccattgtttttccatttttggtcctaatttgctttaacttcattaatttacccacgctaataccactatcatttaactgaaattgattcaatggtctagcgttaaatttttgtgcatatttttgtacagctattagaggagtagttgttgtagtaaagcctaaagctttctcttccatttctgctttttgggcagcagtcggtggctcagcaggcttaagtggtgcatcccccagaatctcagataaagacatattttgtcccgttaattgcacattagcaattacatctttgcagttaagcaataactcattgcgattatcttcgattgagtcaaatgctccagccataatcaatgcttcaattgcgtctacttgtaagaacttagcatcgattctacgcaaaaaatcattaaaagacttatacggtttagtattggcagctatttccttagcaaaatcaagacgtaatcctttaattgcttttaaaccaactaaaatcttgccatcttgtaaagtatagtctaattggctgtgattgatatcaggcggcaaaatacgaactccagcttcctgagcttgcatcgaatagctttgcgctttagcagacgttgatgaattgagcatcgctgtgtaaaatgcagcaggataatgaaccttcaaataagctagccaaaaggcaatcttggtatatgccaccgcgtgtgaacggttaaaaccatagttagcaaattgctctatataatgataaactcgctcacctacttctttaggatgaccttttttgaccgtaccagcaataaattttccacgttcttgctcaatgacattctgattctttttagacatcgcacgtcgtaaaatatcggcttcacccaatgaaaatcctgccaggatttgagctgtttgcatgacttgttcctgataaaccaaaattccataagttgattgtaaaatttgctttaaactgggatcaggataatgcacagtagccgtaccattttttcttgcaacaaatgcgtcaatattttgcattggacctggacggtataaagcgttcaccgctactaggtcctcaaaattgtcgggatgcaatttacgcaaaacaccacgaatcccaccagattcaaattggaagactgcatctgttttaccttgttgaaacagttccattgttttgggatcatttaacggaattgtattaggatctagctttacaccttgctgccgcactaaagctaaaatattgcctaaaactgtcaaattgcgcaatcccaaaaagtcgatctttagcaaacctaatgattcaacatattttttggtttgctgagttacaggaatgccgaaaggaccagcctgcaatcccgaaatgccagcaatcgaatcatcactaatcaccaatccagccgcatgaatagaataatgccttggcaatccctcaagtcctaaagcagtcttaaataacaatttattctcaggcgttgcatcaaccaataatcttagttctctagactcttgatatgctttttttaatcccattttatctttagagtacgggattgcgtgagtccacttagtgatttctggtcctgttaagccaaaaacccggccaacgtctcttaatacttgtttagcagccattgtaccaaaagtcaaaatttgagcagcatgatccatgccatacttttgatacatatacttaattactgtattccgttgaatatcaggaatgtccagatcaatatcaggcatctcatgacgagccggatttaaaaaacgctcaaacagtaaattatattggatgggatcaacttcagtgatacgcaaagagtatgaaaccagtgaaccacaagctgaaccacgtcctggaccagtagtaatttttactcggtgacaatagttaattacatcccatacaatcaaaaaataatcatcgaaccccatctgattgatgactcgtaattcataatttaatcttttctgatactcggctggaatacttttttgaccaaagcgcgcttgtaaaccagtttgagccaaataacgcaaatattcttctgaagtcggaaacttatcttgatgatatttaggtaagaccggtttttgaaagatcacttcagcattacatttctgagcaattttccaagtattattaattgcatcatccaagtcatattgatgatagcgttctaaaacattttgtgcagaatctaaataatgcgaaccagcttgcttagctagtggcaatatatcttgcaatttatctcccttagcaatcgcacgcaaagttttttgtaaaaattgctcacgtggccgtaaatattgactatcttccactgcaactaaagataattcaaattgcttagctaatccacggacataatcaatgtaatctatacttgcttttgaagcatatacacccaaataaagatcaaacgttaacttctttagttggcgaacataatcactgcctaatgcctgatttgtatcatgcagcgccattaattcactttttagattagctggtacgataatcaacaaatcatctaaatatttggttaattcattcagcgttaagaccttatcgttttgcccattttccgttaacaaatttaccgcgctagaaagtcgcaataaattatgatagcccttatttgttttggcaaaaactagcaaatcatatttttgggtgctatcaaccaaaccatttaaacgcagttgcatcccaagaagtggtttaattcccgcctttttagccaactcataaaaattgaccaaaccataagtcacgttcacgtcggctaaaccaaccacaggatagcccttctctttagcgtcttttatcaaatcacttaccttggttggactacttaaaagcgtaaaggagcttatgttttgaagtgctgctacttgcataaattaaccacctttcgtcattacaaacattaaattaagtataccaaattgaaccaatcaggtttgaatttgcgcttcatttttgataaaatcttacacgaaagaaggaatcattatgggtcgttatatcatcacaactgtatggagcgtaatctacatgttagttgtaggctttattgctggtcctttaacccgaagtgcttcattcaacggcacagatttaagaaattgtgtaatcgttgggatcatttttggtattcttttctcagcaattattgcgactattactgctcgttcacacaaagataatagtaaatacagtaagttaaaataattattcaatctattcaaaaaagacgtgagatgtttttattctcacgtctttttcgtttggtttagtaaaacttataattcttttttgtatctacttcgactggtccatgagtcaaatattcgctaaacatttgtacatagtccttatccaaagtggtttcaattttgtccatactatattcaggataaaatcccccacccatagcacgatagttgttaactgctaaatgataaatctgatcatctttgattggcttaccgtgcaaagttagtttagtcagccgttcacctactggtctggataaatccgcttcatattcgactggataaaagacgtcaaaatgatacaacattggcttaggcttaatccatcgatcaataaagccaatgtttcctgcttcatctttcttcaaaaagccagcagagtgctcaataatatgacgtaattctttaccagtcagcttcacacgacacaactgattagcatacggataatttaacaaaacatctctcatagtaatggtcttatcaaatcccttagcagtctcactcatcactgcagttgccgaaacatcagctttagtaaaccataattgcatttgctggattaaattaataaatggcgcgccttctattctgcctttcattgcattttcaattcgagcaggtttatctaaatgtgcaattggttgatctagccatttttgtgttcttttatccaagtcagatacaatatcaacaattacaggatcaggatcataatctttagtgtcaatcaacttagtggacattgatttgattttcttagtatcatcatcaatatcaagaaccacttcagctacagcttcaccgcgataacctggttgaacaatagcagtatcgcgtgtaaccaaatttaagcgccgatgctggtgacctgtcaataggacatcaacttctggaattttggttaaaatctgataaccttcattttcaccacgattaggttcagtcgccttaccagtttcaggatcactttcaaagccaccatgatacatcacagctaaaatatcaacctgagggcgtaatattttggcataatgcttaattttttcgtaagcagaggcaaactttaagccttttacattttctttaggttcccaatgtgggatatattgcgttgtaatccccaataaaccaatctttaagccatttctcttgataatagtgtattctctaccaaaaaatggaacttctgtttctgcatccagtacattatcattaatgattggtgcctcattgttatcaacatagtagcttaaataatctaatccaaagttaaaatcatggttacctaaacagcgagcatcataccccactgcattataagcttgcgtaaaaatacgtaaatcactataatcgccagttgaatgagcataggaagcaagtggtgagccttgcaaacaatcacctgcatcggtaactacaacattgttatcaccatactttttcttttcagatttaataactgagctaactctactcaaactaaaaggagcatgatagtcggttttattttggtaatcagttggcaataaaaatccatgtgtatcactagaatgtaaaaatactaaatacatgtttgttctcctatattattattgtgcgttaactaaagcatttatcaccaatttaatggttaatatgctcactgtttgttagttttatttagccattttttagtattgttttcaactacaaattactacgtctttcttcaatatacttttcaatttgttctaaatcagcttcagtagcaagatttaaaatgaagctctttgttgttgaacgtttattaatgtaaagcttacgagccttatttttatcatcccaccttttatttgccctttttcttgcttcacttaattctgccattagaatctcactcctagccataataaaattcttaaaatcaaaaaggtaaatgcgctaatataaattgccttcgttaaaaatttgtcccaattaatttttttcatttgtattttctcctattctaaattaagatataggaaatagaggatttcaatcccctattcctattatttattttgtttaaaagctaaagcttgattccgaataattgaaggattgttgcgagatttgcaagtaactcaataatccaaaaaaatgttttaagaatcagctttagctttttctttctgcggtaggctttccgcataggatcacctcctagctccgattcccttacctcctttcactatatataatacacgcaaaagcgtgtaatgtaaataaatatttctaaaaaaacacgcaaaaaagaccgctctgggacaatgatcctagggcggtctttgcgatatttggagcttttcaactccttttttattcaattacttttaaaaatttacctggtacccactgtttatcggttcccagcttgtagcatttcatgcctttaattgacttcacgtcaaagtacttccatcttgtatttgtcttaatgtacttgccagtgtaatgacctgtgctgtctattagctgaatcatccagctaggattacggttaatgattggagcatataccacgccgttctttttttctggttttggcttaggtttttcggtcggcttagctgccttatgtacagtcgtagtttctttgtggaggtcaatcagtgagatattaccgtccacgccaagcccacaccagttgtcacagaattgccaaatggctacaccgtccattgatggaaaatagttaaagtttggcgtatatgctagatcagttggataagacgctacccagatgcaagtgccgaatttcttcacgacttgcttagtatcaattgcagttctaagtaaacttgcaccagagtacaagcctactttataaccagcatcgtgacaaattttcataaaagctaaaatcgccttggtacttgccgccttaccaccagtaacacaattgccactaccagtttcccagtcaagccataagtagcgcttcttgctgatattcccagtttgggcacgactcacaaaaaactttgcttcagctttagcacgactggcgttataaccgaaagtcgcaaagtgataagcgtggacgtacatgtgattagcatgtaatgacttaatttggtaatgagctttaggattaatgtaacccgtaccttcagtcagtttgataatgccgaattttgcaccagcattatgataagcactcatgctagtgccttgatatacagccgcatcaattcctagttgtctacttgccatctgcagtcacatccttagctggttctgctggagcaggactttcaggctttggcaattgatcaactggttgcatgatgtctttttcgtccacatcttgatttacagcaggatccttttccaattcttcaacgtcggctaagcgcatagcagctacagctttttcaagagcgccatagatcatgttagctgttacgtcattgattcccatataatgtagagcttgattgatcagttcataacccatttggcgcttttctttactagtaccacccaagaactctacttcatggacagcattagttgcaatcttgcctaaaacatcataggcttggccagcacgggttgtgcggttaatttttgccttgttgcgagcataggcacccgcaattacagcgataaagtaactcgctacagtaatacctaagtaaatccaatctttaatcgtcattttctaattcctccaatttcttttttaatcggtcattttctttttcaactttaagccatcttttacgatatagctccacatcttcagccttctgcttaatttctttgtctttctcagctagcgtgctggcaagcgtattttgtttgctgctactaaatactttgtagaaaagggtcaccgcacttatcagacccccgacagcagttatcagatatcctatcacgttcccaatatctttcatgcggcacctccttaggcgtcgctagctgtcagatagacaaagccaaaaatgattaagtcgccccaagcagagtgccccattcgataataagacgtgaaaatgccatgcgtgatttgcagtaaagctaagaccatgcacacaactccagccaacactaaaaatacgttgctgacgataatcagctggatttttcgcttggttgatcgcatgtatggcactaaaaaagccgttatcatcaacaaggcacccaaaaggattaaccctaagtcgatatagcgactattttcaatactttgaaattgcggcggatagataaaatagtgactatcatgaaacagccaaacacctttacctaaaataaaaagaccaattaacagttcacaatttctaattgttaatttggccttccactggtttagcttcttcattgctaccaccaacgatttcttggtattcagcttgagtaattaagcccatatcaatgtaacttcttaattcatcttgactgataaaatcgttatcaaattcaaacttgtaaatctcaaacattacttattacctccttcaattgctggtgtggtgtttcgtgttggttcagtaggttgagtagcaggttgagcttgtttctttaaatcttgcacttcttgcattaacttgcctgtttgaacgtttgacatagtaaccaaagtagtaagcttatctaatttcttatcaagttcatcatttgattgagtatttgattgactatttgattttaattcagtaacagctttttgaacgtcttccacagtatgaagtagtgcttcacttgatgtgtctacccattcatgagctgtgtaatcatatctttgatgtgtaaagtttggatttggagttttagttacataaggatagcctttattactcatgtcctttgtggtggtgtatggaccatcacattctctgtattctccattaataattccagagatccaaaatgtattttcatttaattctgccattttattttcctttcttgagcttaaaaaaatagacggttttagtgattaaaaaccgtctaatcattgatttaaagccattcttgtttttgctcgagactggctcaatttattcaaaaatccactcaaggtggaccgtgattatctttcatttttatctccttactttttgtcactttgtcgtccaatatcaacgaccgcttaaatgtggactattatttttatcttctattttaaacttcaattacaaaattaactttatgagtaacgcttactttccaactgttgattgcagaaaatccgctattgttgccgaccaaaacaatcaaatatttggcttctcccacatgtaaggtaatttcattactcgactcccatggctcatcaggattataaacttttgcaccattttctggttgatctgtcaaataataacaccataaaaaattgcttccattttctaaagggtcaacgactattttaagatcagtgttcggcactaatgggacaaaatctgatgtatagcgtgcattaggagtcccatagccagtgagatttaaagttgcatttgttgcattggcagattgatttactgtccaattaactaaatcttcggtagcatcttgctctaaagttttaaagccatgaccatcaataaaaagcatttacgccacctccaataaaaatattagtcatataaaactcccttctgatgtataaaaaaggcggtttgtaccgctaaaatgcgctgtcgtttatcatgaacgacagctttaattcttcgatgaatatctattgggtgctgccatctatagaccagcacctacatcttgagaagtaaagccatacaccgccaataccagattagtatatgaatagcctaaggtgtcgtcataatcggattttgtacggacagctaatgtggtgttgtccgtaaaccaaactgacatagctccggtactgccttcattatcacttcgcttgttatttatttcaccgtgtttcaataacggtgtgtgaaaattgttttcaagagtattattgttagcatcttgataaaatacctttacaataatttggtaatattgaacatccgaatactttgcatcagcttgactaaaatattttgtcatatcaatagtaaaagattgatggttccattcactgttattatcaccatcaatataaaaaatatttaggttttctgctccatttccattaagaaactcattttcacctagagcataacctagaacttttttgccatttatcgttaaagccatacggtcaccttctttattctgttatttcatacaacgtatttggatctttagtagcaagcttatcgtagtcagctttactaattacggtaggctttttcatatatcctgtttcaattgctgtaactctgttgttagtgttattcagatccgtttggttaaccttgcttgataaatcaacagtgatattagcattgccactatcatcagggcttatctttgcgccaccgtttacagtgatagttttaagcttaccagcattagaaattaaagtcttaagattgtcaacaatcttgtcaatatcagttttaaggtaaacgtcagcagtgttagccttaccatcaaccacactttgcaagcttgcaagaccgctaacttgagtttgaagtgattgcaatgattcatacaagcttgtaatagtgactgttttatcaccaataacagccgaagtcggtccatcatcaggatcataaataccaattaccagtgatccgtcatctgctagtttcttacttgcatcataagccgcctgtggactgtcacacttgacaaacgacagcttagtggcaagtttttgtgttgtttcagacttagtaaagtgatctgtattaatatttccgtttgaatcaggttgaatattatctacggattttaccttaccagcttgttgcagtcttaaatcagtttcttccttagtgtagtaatttttaatggcgtccactgtcacgaattttgagaagtctaccttatcaaattgttgtttcaaggaatccatggatgctacagtatcagaaacttgcttacttacagtagtaagtttttggtcattttcgctaatgctgtctttaagtggctgaacagtatcattgaaatctttaactgtggaagtcttccatgcgttatagtctgcctgcaaatcagcaagtgctttagtcttatcatcgtttaattgttttaaagcagcatcacgttgatcagtaattgacttaacagctgcagttatgtcagcttgattactggttttaagatcagctaactgcttagtagctgcatcattaatagccttttcttgagcttgccagcttgcagctaatgtattgtacttatttgagtaatcagtaaaatcactattaatcttagtaagtactgcttgtgcttgttgttgtgcattacttgaatctttattcaattgatcaatagtagcttgtgttttttgagtagcacctagcaggtggttttccatagcaataagactacttacataactatcattgataggcttaacagttggatcaaccttaacttgaaaatagaaatcttgtgtagtatcaacaatggtgtcatcttgcttgatttgaaagaaacaagtgccactggctgtataacattggtgagtcatttgataactaaagtgtcctttagtttgatcaatcatgttgaatttaccactttgctcaccagtaccatcatcagcaactacacgatcactctctttaatttctgaaaatgaaacatttttacctgttaggtcgtatggtgaatcatcttcatttaaaattgttacatccagcactaaacctttttcagtggaacgtaaaaccctcgtatcgtctgacacgggggttattgatttatctgtttttaatgttatcggtcttaggctcacttgatttcaccttctttccacgaatttcttgaagttgagcatttcttaaccttaaactttgattttctttttctagttttgctattttaatggattggtttgcaataatagttcccaattcatttgctacatattgttctaatgtgttcatttttataaattccaatacttacttggtcctcgccaatatcgcttaatccatgaacctaatacaggttgatcactgcttgttacaacaacattcctaccaccaatctgtgcttgattaggtccaatgtgtgtaatagcaccactatttttatcatgaatatttactgatccagatcctaaattcaaagtataatttggagaatctaaactcaaaccaccaatttcctgactaggatttagtaaattagtggcatctccaaccgcaattgaaatgccatggttttcaacgtgtaaaacaccgttaatagttcccaaactcgtaattgtatcagtattaatgtgtgatgcatccaaaatagggatatgagcttgatcaacaaagaaattgccagttacttcaccacttgaatcatcaataccaaataaagcatgtggattgccataaatatcatggaaactaagacctaagccattaaattccatataagagccatcattgtttttagctctaattgccatgacattattccaactggtagagccatcacttgaaataggttcaagcataccgccaccgcctgattttaagaaattatcaaaactatcaatgttgttagccatttcttgcatgtgtttagcaaatactttaactgattctccaagttctagtttttgcttaccagtctttttatcagtgacgtattgtgcatcccctagttgaaccataaggttttcccatgcttgttcttgagatgacccctgcaaagttaatgcatggtgaacagcaccaatgaatgaatttgatctagcaattgcttgccgtgtggaagtaatcttttcattagttctatcttcacttgcctgaactaataggtgttcatagctagtaggtaaatcacctaaagttacatttaaaaaaacgtgggctaaacagtcccacgttgtagctgtaacttcagctttttcagtaatttcataatcaggaaaactaacatccacatagtcataaagactaagctgcgtaaaatcttgatcattgtctgacatgtcttgatagtcaagtgatgtctgaacctgcatatgaccatatctgtgttcaattagataattcttaccaatttcagtagcttgatcaatgtcagcttgagtagcaacaaaactaccatcagattgttgaccgcttaaatcttgatcatcgtgtttgaagtaaccactaatatcaacagtattaacgctatcaatgttaggatttacaccaaatccgttagcatataatggaccaactttaactattacttctttcttagattgatcaacattagcactgtagtttgtatcagtatcatcagaattatccttatcagcatctgcagcattgatttttgaatttttatcatcaatgtcatcttcacaaagccatccagttttaccatgataagtgacttcaatataagttttgccatcaccagatttggcttcatgaccgttaacaacttgaaaactttcaccgttgggaattgaccagtttaaagcatcatttttatcaggtgttgcataaatttcaaccttagaatgatcttgaagttgcttattaagaaaatcgtcaaagctatgtggttttactgaaccatctttaacataactaattgatccagagcttacccaaccatgtgaagtgtgcatgtaagtcttaccgccttgagtgattgtcttatcaatagtagacattccttttttagcggtaactttaaccttcttctgcttttctttcaaataagaaccattagcaactttatgtttatgctttcctttgcctacccatttccatgcctttttctgtgatccatgcttaataacagttttgttagtagataccattttatgatctttggtgaagtggtactttacagcaccatctttaacataaccataaccagagttgctgtattgacggtaacttccttcttcagaaagtgataggtgcggtccgtataaccattgatgcggtccaatgcgataccacaaatcaccatttgaattacgttcaatcatgtcataatcaataacctgcccattggagacagtccaaccagggattctataatgatcaggtccgatttcaggtgaatagtaaacatgaatagaaccaccaggcttataagctacaacagcagacccatgaacagtaacacgagaacctttcccttcagaatctaatggattactacttttaacagtaatagttcctgaaacatcattaattgcataagcaccagtagtatcaaaattaatccatttagagtcaatccaacctccaccatcacttgatgaaattggataccagccatcagaattaacagtattaatttgatatttaccatcaggagtaaaactaccatcattaacaattgtacctagatgcagtttcataccgttttgtaaagtgccaataactttttgaccttcaacagggcagtcatagatacttacctgacctccagccatgtaagtaatacctacactatcataatcactttgccatgttgcccaaccagtccagtcgcttttagcaattgcttgaccaggtacatatttagcaataaatactgcgccagtaaacatattttgaatgtttttatcttgactgaaggtggatttaatatttttaccataagccactttaatgcctgaatcatgaccaatacgacttgaatgatgaatattccaattgtcaaagtcaaattcaccaccaaatagccctaaaactgactgtgtagcagtatcaccttcctgatcaggatcaataaataaattacttgcctgttgaccgccttcaatgttcacattacttacagtattaacatcagaatcaaaagcaaattctctctgtggttgcatttgattaagaatctgattacctaagtcttgtgcggatgcaccatttaattgaattgtatcagctaccgttgaaccattaagcagagctgtaatatgttctgcttctacaacaacgttatccaattcaggagtaatatgagtgattttaaataattggtgaacatgtttaggatcgcaatcttccataatccacttgttaggctgaatttctttttgatgtagaccacttcttggataagtcattgttaaagtccaatattggtttttactaccattaacttgacaatcaataacatcagggagtggtgtaccactagctgtaagatcatcagccaaactgttatataaatatggtattgtcattaaatcggagtagtcttgataatcaacttcagagattgtgcctatagttagtttcattaaattagcctcctccaattaggtttatattcagctttagtgatagtagctccattttcagcagtaacagtgattgtattttgacccttccacaattggggaggatcaaggttaggaaaatgagtttgtgtgttatataaattgcctttggcatcataggtgtcaccagtttcacctgataaccaaaattcgccctccatattttcaaatgtgtaaggtaaatcattaacgtaaagggtaaaactaccgttagctataaaatgccaatctggtattgctgaccatttttcttcaccaacaactatttcactatcaggcaatggaatataagcaatcccatcaatgcgatattgaaacggttcacaataaaaaggtattgcacatgtaccaacaaaatcactggttacatctttagtaacagtgaatggatctttaacaatagctttaaacacatatgttggatcagcagtgaatttaaggtattgatatctcattcgcccatcaggatcagttggagtagaaagccaatcagttacagatcgttcccaatcaaaccaaccacgttcaggtggtctaaggatttgcagattaaaggtttcagtcacattttgataggattggttattttgtaagaaatcgccatttctacctttaatatgactaggatcaatatctggagttggatgaattaagtcccacggcttttgtacaaccatgccaaaatctgttgaagcatggtcttgaaaaattagctttatatcatcatctaaatcttgcacttaatccccttctttctttaatcatgtcttgcctacgatcagatttatagaatggctcaataacctcccaaagctttcttccttcaggagtagtaagcgtaatgtgaacatcatgactttgaacactcattttttgtaaaactaaaagcatggcttgtaataagtcatgctcatctttttcatctttattagaaatacgttgttggttagcatttaaattactgttagctgtaagaatacctacagccttgccaattaattcccacgcacgagtagacttacttggaatcaatggaacagccatttcaggtcctgcttcaccaaaaatacttggtgaacttgcaataccaccattagcgtaccaattatgtgcttttctaaatcgaacagcattagcaaccgtaccataacgatcatgaatataatccataatacccattaattgtgcaataggattgctcttagaaccatgtctagtgtagtaatgcaagttatagctttgcatctgtcctaaaccataagtaccagaacttgggttaacaatatgaggattccagccagattctgagcttacaatccagttaatgcttgaccaatctttttcgggaatgtgagcttgtttcatccaatgtgcgtggtcaccagttggtttaccagccattgaaccttcattttctgaaagatgatcaccaatccagttaagtgccttaccacctaattcacgtttagccaaagctaacaaactaggcttaattttaggttgatttttagcttgatcatgaagagccttaacacggtagtaaccataacccatgctcattgcatcagatattttactgatacgtgcataaggtggcgtttcgttaaacattgtgcccttagctgggttattgataataccaacgtgaccagctgcaccagtaccatgaccaaagatgactaaatcaccaggttcagtcttagataagttcttacctaagtattgaacacctgatgattcttgcatagcaacagtagtacgaccaatattaattccaaaatgtctaagtgcttgcataaccatacctgaacagtcagataaggtctttgatgcagcacccatttgatacttaacacgatcaaatgtttctttagcataacgtaagaatgcagcacgtgaaccgccacctgaaccaatggctttattaataaccgtccacatagcttgagaccacggattaccataatgagtaccagagtttttacttaaatcagtagcgccttgagttaaatcagaacctacatcatgtaagttttgagtaaacatattcttaaagctttcggcaaagtgttttaagctattttcagctaattttctaagtttttccttattgataccagtaccgcttgcgaagtgtggaagagagagtgattgagtttgaacaccattaagtacaccccaaccttttctcaataacatcttatgattattcccatgaggaataataatatcattttgatcggttacaactgcttcctgtcgtggaccagtagtagcatcattaactactgctaaagtatcatgagttaatctaccgcttgcatcagtacctttagcaaaatgcactggattgataacagaactattgccaccgaattgtttcaaagtgctgtcaataccacgaataccacggttaatctgtctgattgtgccacgcatagcatcactagcatagccaatcattttatgcattgcaccgccaaaaccacgagcagtagcagtgcctaatttaataacgccatcgtgcaaacgtttgattgattcataagattttttgtaaagattactaaaatcttgttcagtggattttctgatcttatcagtctctttatcgacatttgatgtcatcgtcttaaaatctttagcagttgctttagacatgctagagatcttcttggtgaaattgcctttgccttcgagtgacttaacagccttttcagcctgcctagaaatttgttcgccaaacttatctttacttgcagatttggctaaaacattcagacgtttttcagttgtatcaatgcttttatgtagtgatctaagttcatgagtgcctttagttttaacactaacagtactctttttgcctttaaccttcttaattgctttaactaaggatttaacagatttagcacctttggttttaacaaaaaccttgtgagtgccacccttgatacgcttcatagctttttcaagagctttgatctgcttagtgcccttcactttagcagctacagcaattgacttagaagataagcctttaagtgacacaccagaaacactgatacttggtgcagaaatacgacttgaaccactagaatatgagcgtcttgcggatgttgatcctcttttagttgatttacgtttcttagtcttacgctttttagttttcttctttgttttaggagcagtagtaagcttcttaaatagagtattactgatccacttagatttaccaattctgctatcagcaccaattaacaatccttcatccacaagcgtttcaccgtagtgaggattagttttagcaacagctttacggtcttggttgatgcgactagttaatttgtttaactgtgcaattaagcctttggtatttctgcctttcttaagagcatttctaatttccttagctacttttgctctatcggctttatcatcctgctcatgcttgatcagacgcttacgctcactagcagtagcagaatcatttttatcatgacgttctttctgcttttcatggcgtacacgatcttcatcgtattttttcttagtaagcttagttaaagtagtaagaattttaactggattcttagtttcaagactatgaaaatcaacagtaccatttgcaagatgaactgagcgtccaaaaatacgggccatgtcatgagcattgatcacatcttgccatggaaagatccaacgtggtacattcacaccttgttggacttctacagaaccatcaggatttaaaattccttccttattattagtagctggtgaatcattgccatcgtttaagattgcaggataaccatatttctttttccaatcagttccgctggccaaatggatattgccaaccttgagcttaccagtaaagaacttttgtaaagtcttgataggtcctgaaatgtgatcccagaaaccatcccaagctgatttaataccagaaatgatgttcttaaaccaaccagtgattgccttccaagggcgcttgaagaagttagtagtgtctttacccaatttactaaagaaactagtcattgagttccaagcgtgcttaacgttcttgccaatgtcgctaaagaatttaaccattccatgccaagctgatttcaaacccttggacatgcctttgcctaacttggtaaaccaactggtcatcgatctccaggctttcttaataccgttgccaatattggagaaccatttagtcatacctttccaagctgatttaagccctttagccatattctcgcctaagttcttaaaccacttagtcatgtctttccaagacttctggatattattaccaagtttactaaaccacttggttacacctttccaagcattcttgaaacccttaactaaaccgtcaacccacttatggaatttcttgttgtgcttataaagtgaattgatcgcaccagcaataggatttacgaagtaaagaccaacttctttccaatttttcttgaaccacttagcaacattagtaacggatttcttaaatcccttccacatgttgtgagccgaatatccaaggttttcaagagaccagaatttcttaggtggcttattgcgctgccagcctttagtgaaactattaacagctttaccgccccattgcccggcatatttaccaataattgcacccacaggagcaagcattggaccaacaacaggtatcatgctagttaaagcaccaccagccacagcaccgacagcaccaccaatatcttgactacgtttatcagcagagtgacggtccttaacagcattaatcacttcaggggttgcaactgcggcaccagctaaggcaccagttgctagacgcttacccatgctaaactttgtggaagcttgaacagccttagaaattgcttgaccaattttagtgcctaaagtagttgctttatcaataattgccttagagccttcaagtagtttagagccaatccacttactagctttaccaatacctgtagcaccttttttcaaaccagaaacaatatttttaccagcttgagaagcccaactagttagtttgctgtttttaagtactttaaagccatcttgcaaatgatctaatactcttttagttaagtcaccaaaatgagcaaatgatctttcagcacctgttaaatcatgaaaatcttttaagccagtaaaaccagctcttaaagcttttacatttttgtatgcattataacttccacgagctatgccaaggaagccaccacctagtttgctgattcctttagcagctgccatagcaataatagctttactaatccattgaatagcagttttattccttgctaagccatcagtagccaatttcagagtatgtaatgcatcccctgatttctttccatttccatggacaattcctaaagctttaccaatattttggatgattccagcaaaatatttccatacatctttgccaatagctacgccaatggatacgacatctttagtaattccaactaaatcggatttatgcttatctaaaaatccaatcatattggaaattgctttaccaagttgttgggcaccattcataactgctttagaagtcatgatattctttaaagcttgtaagccactagtctttgcattaaaaattggcttagtaaattgctgttccaatttttgacgagcgacctgcattgactttaatgcaccagcttgagttttgccaaaacctttgaaagcatcatcagaatatttgcttgcactagccatccattgctgaaattgcttttgtgttactttaccagtcttaagtaaagcaatcatcttagattgtgacatgccagcgcctttagctaatgcttgcataaatgtaggtgctgctttagtgattcgacttaagctggaataagttactttaccagttgaacctacacgctgaagactagctgatacacgttcaatctgatcaccagtaagtttagacgtatcacccacaccagctatagtcttagccatttgcatagcacctttagtaccaatcgttgaccaattgagcatgtgtgcttgcaaattagcaacattatcgccagtcatagcggtattagcttttaattcgcctaattgcttgtctaaagactgaatctgtctagtagacattcccatgcctttaaaccgaccattgattttagcaacagccaaattaaggttcatgccttcttcataagcattttttaagctagaaccaatgttgcttaaactattcgacaatgcattgcctaatgctgatcccataaatacttctttaaaagttctatgagttttttcagcttgactatctaaacctgtaagcttggtttttaatttgtcaaaaactgtcggattagctttatgcattgaagaatttaattcattcattgcactcttagttttagctaaagtcgtagcggtttgattaagcctaatttcttgacgtttataagcatcacttgacttaccagattcactagcaattctggccaattcttgagcttgaattttttgttgcttatttaaattttcaagtgaagatttatagccatttaatttagctttggctgattcatagccttttccttcagcttttagcctttcaacataagacttagttacagcttgagtttgctttaaagatttttgtgcttcagctaaaccagacttgtaatagttcaaggaagacttagctttttcttgttgtttagtaagagactcaagacgagtagtagcacgtaacgtttgcgcagcattcttttgaatttcttcagtagcattcttataagcctgcttgcctttttcagtagtttgatcagcttcagcctgaactttcttcaaatttctttgcttatcagctaaagcttcaatatatttgcgctgattttttacagtttcagttaagccggcatatttagctttagcagcttcagtttgtttaccagccgattttaaaaccgcttcttgagccttccatgcactagtagtactagatacagcttgtcttaattgccttaatgtttttacaggttgatcaccatttaatttaatatctgtaatcagtgaaccaactggtattcttcccgccattttttacctcctttctgttttgtctaaacttgctgcaaagtcccataggttcattggacgtttgtcctttggtcttgcactcattacttccacaagacggtagtaatcagtattttcataatcttctaaggacatatgagcattaacaatcatttgttgttcttgataatcaaagtcttccagcatttcctcataggcatgtactggatcaggatcattaagcattgtcgcttttggaatcgtctacttgtaagatttttccaattaagtcagtaacaaattcactgacatcacctggatcagaatcttcaatcttatctacttgtgcatctgataaatgaagaatcttctttaaaaacttttcttcttcatccaaaagattttcttgtgcagttaagacatcaagaattgattgatcatcatcgtctttgaccttgttaattgcaattgataattctgcaaaagtcttttgtgccttaagacatgcacgtacattttttacagttgtttcaacttcaaaagtagttaagtgcagctttttaccattgatttttactgacattgattgatattcctttcaaaaaagaaaagaacggcttttacaccgttcttgacaaagatattgatattaatttgccaccactacccaccctgctaattattagtgagtagttgatgatgaaggaatagtgtccttatgagtagcatcatcaggtcccttgtgagttggatcatcagcagttgaaccagttacagtacctgaaataatccaattaagcatcttgtcgaagtcgaatccatcttcatctgaatagaatttttcgtaaaccaaaccatctgatggacgtgcagcggcatttaaagtgaaggtatcgtgtaccaaagttgggttttcattatcagtacccatagttaaatcaccgccaggtttcaaattgccatatggcaacgcaaagtaaagatcaacgccaatgtttgagttatatgagtgagcaataacaccaccatatgccaatggggttgagtccttagccatgttcccaaagcctaacttgctgtccttttcaagacctacaattgcatcatagaaattgtgcggaatgtcgttagcaccaaaagtaccagtaatttgatatgcaccaaagtgttgttcagcttttgcgttagaaccatagacagcttgtgcagtacgacttaaaccagtgatgttagcttgagtagcacctttagatgattccaaatcaatcttaaatacaccatctttaccaatattagtggtcaaaccacctttggattcatcggtaactaacttaccgtccttgtcatatttgaaaacaagtaaatcatttaaaccttgaagttccatttttctctccttttaatttgaaagctaattgttggctcaccagaattagggtcatatgtgtgccctgtaaaactagctacgatttgccaaccattagctacgaaaaaagacatgagcgagtgttcaaattcgttcatgtttacttttgtgtttttactataaaaaacgtttatcgctaaacgttgtatctgttccgtgtattggttactacctgattctgtaaaatcaaaattcacttcactaacaagtatatccacagaatcacgtggagtacgctcactagtaccaactgcaaaactgtaggctttatgcaatttaggaagattagagctgtttagcaaatctactacctgttttgctacagtactcatttatctaaaatctctctgaatttttcagcattagcttttagtactgcttctgcagcttccttttctgcatgatctttaaaatgaaggttggatatttctttttgagacatatcacgtgtcccatcatttacaaaacgagcgaccattgcattatatttatcttcccagcctactgaagtatcaccagtattaccatcgttgacttcataacctgctttataagttatagcgtcacgcatgtgtttagacttacggccatgaccagctgaccgtgcatgtgcatagcttgtatgagacattggagtgttctttttaagcacttcagcgtaagtcttagccccttcaccagtgatagctgatttttgactagtagatagatcaacttttttagtgatcttatctagccaatcatttaggcctttatctaaatcaaccatcacggtctgtcacttttgtgagagttatgagatcgcctgcagttggattttgaaatggatcaagattgatgtcactcacttcatacaatttcccattgtattgagcatgagtaataccatcataatttctgcgatggtgaataacgacaataaaagattcatcgtgatgatgtccttgattttgaatcatttgagtagtagttaagccccatcgaccacataaagtagggctagttaatgctttaaattcattagtaggaagtccattatcatcttcactatcttctacagtaccaaaagtgatcctattactcagtcggtcccatgtctgtagttgtaccatcgtcattcaccacctttgtttcatcataggccccacggagttggcctataatctgcttagccgttgtacttgatacagcagatgtaggatgcaaaaaccaattagccgcaattgcattaactgctaacttatacagttcaaatactgattcagttttgtaaaaactttcatcagcatcttcaccaattgcgccttgaacataattttcagcacctttcaatgccgttttcatacgttcttcatcactagaatcaagcgcatcatcgtcaggtaagtaaccaagtgagcgtttaagcccatcatcaactgttaagtaagtggtcatcattgatcacctaatttctattagtgattagcagatccagcttgagtgccaccgttatcagatggaacttgaactgattgcataagcattggttgactctcaaccttgtcaaatgaaccagatacaattgcttcatcatcccaaatcttggtatcaaatctaagcaatgcacgaatagcagtttgattacgtctaaatgccttatcagcaatgttagaagtaagcaatgacatttgttgacgatcgtataaatgaataaattccttaaagttaccaaagtagaaggggtggctttggtacttaccactagcattagtgttgttaggtaaccaagtatcttcaacgacacgaacatttacatattgcatgccgtccatattgaaagtggtttgttgagtacgtgggtctacactcattgcacgtgtaccatctgacatacgcactttagctaatgctaagaaaccagatttattagttaataaagtagcgccaccccataaagccatatctaattgacctaaagcatcaataatatcatcgagcttagtaatagtagccttcttttgtgatttaggaagtaagccaatgatctttgaattataggtaacaacattcttacgtgcaatatgttggtttaaccatgattcaatatttgcatttgaatcattgattaaatcattaggcgcaaagaatacatcaccgtagtcgtggatgttgtaactaagttgcttaacagaactatagtcgccttccttaatatctttatcttgccatgcgtaagttgagttattagttgaatcatcaggaatatcatccaattgatccattggggtaatatttgaaaatggttcaatatttctagttccatgatcagtaccaacgttttcaatagttaccaaatcacgtaagtcatcatattgacgcatcaaagtattaatttgagtttgttggtcgtctgggatagtcaaaccagcgttaccatctgaagttgaacttgatgataagttttccatatacttcattggatgtttaagcatatccttgaaaccagaaataacatcctttgatttatcttcagtcttattttcaataggctttgatgctggtttattaaccttttgagcttctacagcatcatcataattttgtttagcaaaattacgagcttgaaccgctttgttataagcttcagctgcctttttcatatcttcagcagaaacggattcgggatctgcttcatagttcttttgcaaagctaccttcttattaaagagatcagtaactttattgcctgcttcaatccaggcattttgtaattcttgtaaattcatgtgttctcttctttctattgccacaataaaagagacaagtcttttttgacttgccccttatctgtatcttcttgtttattttcaatgggtttagagtcagcattggactttttatcatgaattaatgctttaatcttacgaattgcattgtcacttaaaacgggtactccgtaagcattcacaaccgctggtgcttgatcattctcaaacataatagaatcagcaaagcctttatctactgcttgtttagcattcatccaagtagtttcacacatcatacggtaaacttcttgcttatctaaacctgttcgcttgctataaagatcaacataagcttgatccatagaatctagcgattgcattgcactagcaaaatcatccacattgccttcaacaccaccgctaactctatgaatcatcatttgagcagttggcgacatttcaactttgtcagccgctagtgcaatccatgaagcagcagaacaagcttgaccaactacttgagctgttacattacctgggtacttctttaaagcggtatacatttctgagcctgcatcaatgtagccaccaggtgaattaatctctaatgtaatatcttgaccattagcattgctcaaagcctcatttaattgattagggctagtcacttcatatcctagaaatgaataaatatcacctaaattattgggtacgattattcccttgaccggtactgttgtcatcgtcttcacctccttcatttgctggaattatcggtttatcgggagttggcaaatcatcaggtaaataaccataatgttgcaaaacataccgtccttgattgcctgacaaaatacccttgcttgataaatcaccaatttcagatgcaaagttatcaccagttgcatcaatagctggtctaatgtcataagtaatttgactatttaatttattagacaattcaccttgaaccgcaccagcatagcgattaagagctttagcatattgcccaccaatttgagtaatattactttgctggtcgccttgaccattaaggtaagaatcaggcacgccatagacctttgcaatttgcttaccagtccaatctgcttgtgaaagtaacttagctacatcactttttacttcaagtggctggtaagtttccaaatcatctaagacaattggtccattatcagaactattaacctgacgcataaactcacgtgatctagctgattttttcttccaatcaagtaaaccaccgccttgaatacttaaaatcccaggtgcttccacagattgagagagagcatgtaatgttaaacgattacttgcattcttgatattcaattcattagctaacccagtaagcggagaaacaccagtcttaccaccgtttttggatacaagcctgatatgaataacatcgctttgcggtacattctcttttggctgaatatcaggctcatcaaaattgatgttatatgttagccctgagccatcttctaaaagcaatgtttggacctgagacggtcttaaaaactcccaatataaatcaacgccattaatatttctccacctgtaggcataagcatttccgtctagcagtaactgtgcaaacattccttgccagaaactaaacccattagtcaaattagaaggattatcaattaagttttgcactctatccttgttagcattgagtttaaccaaagctaaatcagctgataattgtgaaataagtgaaaatatatctgaattttttaaagctgtatctgcagaaacataattgctagcggataaatcatttttaaacaaagtaataaattcaggatcatttaagctataaccagttacattacttttgtttaaattaaaaacaggcattattaatcaccccctccctgtccatgtggaagtagatcaattaataagcccgtcaaaagtaaagcaattcctagacctgcgaagcctgctattttattccataaaaaaagagctataacaataaagccaaagcctaataaataaaggattacatctaagaatttccaaatatctttaaacagtgttttaattatcacccgtttcacctcctaatagaccagaatcaggattttcaaaccactttagcacctgctcttgtgtcattctttcaacttcatgtgacttatcattaatcaagccataattttcaaaattgtacatagcctgatacatggcatctatttcggcgtccacaacatcaattttcttggtagctttatccttatcaacttgaataccaattttatcttctttgattactgcattaagcaaagccatttcttcaattggatcatcaaaccgtgtaattttgccagttgcataagattcttgtaagaacttagttgggttagctaactcacttgtgcgttgcgctatgtcttgaattaaccaccctgtattggcatttaaactttctgtgatgttcttaacctgatagctgccaaaacggtcataaccgaaaaatacgacttctagcctatgtttttgaacaaaatcaagtatccaattgtagacttgttcaggattgatgatgcctttttcatggctagtgatggtgcagtaccctttcttttcaagttcacgataaggaagaccatcttgtttttcttttgcttcaatactccctgcagcttgccatggaataaatgaatgctgcatcatatgccatttgtgaacaccatcagcagtagtataaggaaatgcgaagccaacagctgtattatctgaaaacattgagtagtccaagcccatgtagactcttaagccgtcaatctcaaaactatcatcaacagcgttttcaacatctttaagatttaagtagcttgcggttgactgtttcaaccacagatttaagttcttgttctgaaatttgtggagcgtgttggtaagcatcccttgatcacgttgtttaatcagattttcagttctacgcttacgttctgaatgagataaaccaataagcggatttgatttttcccatgtttcaggcttgaaagtttcatcaaggttatcttgcgcccacaccagacagagagagttatcaccttcacggtcataatctttttccataacatgctgtaatgtaatttgttcctgatgaaatggactggtaggatcaggataagccgaactgatcttgataaattgatggtatggaattacttgtgcttgaccatctgtaatatctgtaattctgtcatatgtattcaacgcaccagtttcatcataaatagccaaaacgttgtgagttgaatcatatttatcagcttcataactgattttccataccttattgttagttctcttttcaatgatttggttagtttgtaaatcaagacctgattcttttgcgagggatgcaaaaggttcaatcttaattactgcttcaagcattttcttgatataaccaaacagctttgtagactgatcagatgtattagcagtaactaaaaagtctttgttggtgtaattcaaagtatcaatcaaaacagctttacacatctgaataccagctatttgtgtcttgccttgaccacgtcctactgaaatatgaatatcagtaaatcttttttcatcattttcgtctttccaaccgttaatcatagcaagaataaacttttgccaattcattaatggtagtggtttatgaaggtcaacatctggaacaattgacgcaaatttaagagtatttctaacttccttcatatcgtaatgatatggaaaatcaggttgaccttgacgctttaaatcttgaagatttctaaaacaagcaagcttagtaatataacctgcaatttgcttaccatccaaaacgtcaaaacagtatttaatggcatcgtcattatatttaagtctgatgtcattccaatcaattgattgataagcaccttccacatcatgagtttgagttagatcaattttcacttcttaaaccacttcctttgagtaaaataaaaagctaaatcacagatttttgtgatttagcctattaattattaacaaaacagccattttgttaataatgatgcaaatttttactgcatttaactagcaaatagcttttttataattttagaatgccgtctttttatataattagctacttctctaatctgattaattggattcaaaacatctaaatcctttcttacccattttccatgaccgtgcttaacgtaaatcatgcgaaaaactcctttaaacttgtaacagttgatttagcatcatcatttttaggtgtattcagttccatcatctgacttctggcttttgggcttaagcccagttctttacctatcgtgttcatctgctttagcgaatcagacataatctgataagctggatttttcttgtatccttgaaagttcttagctgccaccttcccatccacaggagagatgacggttttatagataggttgctgaataccatgttcttgaatatcgtcataagccatgcggtaggtgtcgtaggctgaacagtattgttgaagtaaatattcatcagctcgtaagattttgtcattcttatttagataagtggcaagctttggatacaggtatttgccgtaagttccaagccatttaggtgcttgattaggtacttttggctttgatagatcaactttgttcatgtttcagccccctttcaaaagctttcaaaattttgtttgtggcacaagcgaacggcactgatgcggctccctagcgcccaaaacgagggcggggggcaaaaataatcagtgccatgtgaatcataagtgccaaaataaaaaccgcttagaaacgattttatgagcttgtatggtgtcgttcgttagctattttctgtgataatttagcaatcaatttaacatcagttaccggtggattatttgtcggtttaccatgtaatcctgtgccatagtacttttcttcaaatctagttttccagtagtggcattcctgacagcatgtgacaagattttgtaaatctttcatgtgatcagggaatttctctactggcaaaacgtgatctattacattaccctctttaactttacctagtgctttacagtactgacataggctgtagtcacgtttaagaactataagccgcatatctttccattgtttagaatgataaaactcattctgctctgctttaatcggattgcgattgcgaactattttgttgtaataacgttgtcttgctgaattgttatatctatggaatcgataaaagttattacgcttttgtagttctgtttcatgtgcaatatgttttctacagtaatggtttggaacataggcaaactcgtgacagcctggatatctgcaacgtctaattcgtggcatcaactcaccccttttggcaaaaaaagccgacctaagtcgactcatgtttgcacgctcgctatgtattcataaataatatgcggtaatgtttgattataggtcatcgcatgctatggaacagcatcaattgaattatgacagttaataaacacggctgttcctaaacatagtcacggaatcgaaccgtgaccatgcgaaaaaaaaaaatctaagattgtttgtcgaatttcattcacttttcgacaatatcaattatgcactaatttccaccgatcgatctccgatgaaagtccgcacagtttccgacaaaagtccgattcatgcatacacacgaagatcaacaagattatcatcatccacatcacattgctgttgatagtagtcatatgcatcagcaaattcaagcagtgaatcaggcttgatacggttatagtactgtgacttttcataaggcaacatcctaataatttgttcttgatcatagcaataaacatagttatctattaatactgtcttatgtaattctgaacaactatagatacttttatatatagcttttattacttgttcaatagataaagcactaactatagatgtttcagcatagttgtgccccgtactatggcttggtgcccatgatagtttaggacttgataaatctattaaatcatgtccgcatcttcgtaataatctaggcaattgtttagatagaaatcgatcaacattgttagcagtagcagaataatttacttcagcaaataaattcaaaataaccaactccatataatagatatataacaattcgtaatatatctattatacttcataactaatagctatcgatataccgtttaattgctttagttgcaatcattgacattggttcattcagtctatcggcataatcttttaattcttcataagtatctgcgtcaattgttacttccataatattcacctcttctatttatatccgtagccaactaaaccattctctacaatctttaatgcatcattagtatttcgtgcaattccatgaataacattgaatttcattagcattttatgaaaagctatttgatcaggacgcggtttgccagtagcatttttcacttcaatataaaaagcttgatgatcccaatcacgccagccgtgtaagtcaggatagccagacggcaagcctgtagtaaagaatctgccatcaggtgttctaatcttaccgacgttagcacgaaaaatatgacaatgatgttgcgagacaactaattcaattttcttttgtatgctatgttcactttccatcaaacttacctctagtattaaaaattgcgtctgattcatttttctcatgcataattattttcatgtcatccatagttgcatgctttttcatcagaattaattgtgctggagttaatgaataaaaatcccccataaagtcatcaccccaaatgccttttcgtttgactggaaagaaatattcattagcaactgcatcataaattaatgaatcaggataaatctttcgcccatttttgtcatgtgaaataggcttatttaacatagttactgtcctccaaatcatgaatacgacgtgcaagaattaaaacagattcccaaacaaaattatcttgggcattagttctgtctttgattgctattgttaaatcttcattggctctaacttcttttaataaagagtcaaacaaattattacttttatgaatttctttcataagatcgttgttagacttcatggttttataatctgaaaacaaattcagtacacttatcgtagggtaaagaattgcaaataatacaagcagtgcagttttcattacttgtcatccctaactagcattggcttactatccttgttttcttcaggaataagttcctgttgatcagcttccaagcttacttgaactccgttgccatcaaaagcaatgtctttaagcttatttaagttaatcttatgagtaagcaagtctgcatctaattgcaaaaccactttgttaccattaactttaaagttatttgttgttgcttgaaatttaattgtttttcctgtcattttcatgttccttttgtgtttcttttaaaaattctttttccgcttcatttgtcaaaaatttaagcgttagcatagtagcatttaagtttaaataaagctttctggtattaactttatgtcctttgttccaatgctgttgttgtcttttaacatcatttaattcagattcaacagttttaattccttcattaaataactctttatcaatcattttcatgctcctttttaggaattaaagtcatatcaacatcattaggattaaatttaatttctaaaattctcaaatctgtaacatctctatatattgattgaccagctgatcttctagcaagttgagcatctaggaagaacccaccagggtatctattagatctcattgcttcccatcgtccgctatccttattgaaatattcaagtttataaatcttattcatccttgtgctcccccagatatttcaaacctagaattgcataacctgcagtgtctagttctgaaatatcgcctttaaatttaataatcttaccgtgcattttagtttttctccgttaatttacgaccacacataggacaatagttaatcttgctactctttgatacataagtaacttcgacatcacaagataaatttaattcatttccattaatataaacatttccattttcatatctatcaatacctgtgtacccatcttcatatgtatcttcaattgaaataattgatttttcattattacagtaatcgcacataattattcctccgttaatcagtaatcacaatgcatgcattcactttttcagcgtggttataactattctttaagtccctagccgcttctttaggtgagtcaaataatccttcccaagtttttgcttcattgtcactactactgtgtatagttacaacaatacaacgatcttgttcataataactatcataaaaagtcgagattctaaacagattatattcatctggatcattatcccaacacattaaaatatcaccatacttgtaatcctcattagttttcttcgttcttttatcaattactttcattgccatactcctttatgtactcctgaggcaacataccatattcattaaagaactcaccacatagagcaagatctgatcttacacagtaatctgtagccattatgcgtctagcttcttcaagacccaatttaatatcacgtccgttttcatctttcattttcatgctccttcgttaattttcgcccacaccaaggacaattattaataaaaatctcgtctatttcttgagaataacattcaggatcaggatgagaaataattaaagctggatgatttttacaatcgatgtaagtaaacattatttcgtcttcaccattcaccttattaatctcatctggatcaacatagtcatctctgtaataatcacgtcctagcttagttttcggattaatttcacagtatttacacatactaaatactcctttccttaaagtgacttccacaatcgaatggatcgtagtgaatttcagcaccgtcactagaatgccaattgttttgtttgaatttagttatcgtgagatgattaaggactgtatggattgaatatctactataagctgatcttctttatatccgttaatataaaagaagtgatttccatttgcattttgttgaacaagatcacgtcttaaatcactcgcatcataacaatctgcattgaaaacagttctattgccatttttaaagtctatttttacctgcatttttactccatttttctaaaggtgatagttctaggtgatagttgaaataggcttaatcccttgtggctctaagcaaggtgatggtaggtgatagtttcctttatattctttcttatatagaaaagaaaagaaaaaataatataaatagtaaaaaaatccaaaactatcacctaaatggccttaaagtcttgtggctctaagtttaaagtgtcacctcaaactatcaccaatctatcacctaagtattacccattccattcaaatctagtatcttgtttaatacgaataccttcataaactttatagccgtgcgatacttttcgatgaaatttcttactcatttctttaccgaaccttgttaaattcatcttgtattcattggcatcagcggcccaatttttgtaagaatcatataactctccactcttagcagtgtagccagggccgagttcgcaacaatcgttgacaaaaccagatagaacatccatttcttcacggtatttctgtgaagcattcttaatcctttcaggtatttgtaaaccctccacctgccacataattgcaccttcaacaatccaattaagaattcccatgctttcagcttcaagtttgtactttaaattacgatcaattttatctttagggacctgataatcaaaaggaattaaaatcaatcttctccaaataccttcatcagtacctctaattagtggcttgtggttagtagccatccagatcttatagctaggttgatattcaaattctttcccatattgctgacgagccacaattcgatccccaccagtaagttgcttaactaatccttcatctaatcgttggccttcgttagtttcagaactgataaccatccgacttccttcaagtcgggcaatgtctgagttagcaccatttgagttgtacttagtcataatagatgaaacattcattgtttttgcataaccaccagcgacatcttgaattgtgtttaacagaaccgatttaccattgcgaccattaccataggggatgaacattacttgctctttggttgaaccagtaaatgaataaccgatagctttttgaacataatggattacttcttcatcattttgaaaaatttgtttcaaaaatttacgccagtttggtgagtcgattgtatctgagtactctgacccagtttcagcagtaaacattttactaatatcgtgtggatgtagtctaccatttgtaagatcaacatagccgcttggagtattcaacaacatgtcttcttgattccacattgagtgagtaacaggcaaacggtgctgaagttctttgactaggtcgactttagctttatgactacgttcatgatttacaaacttattccaagaattaaggattttagtctgttcttttccaggtaaagatggatcaattttaggtctatctttagctaaatccttaatcacacggtctgcagcagtttcaatatagccttttgtgtctggtgaccaatacgaaccattgtaaatgtaccattccttatcaacatacgaatacaagaaatttttgccgtacttgtcaatgaatctttctgccatacccatatcatcttgagtatagtgttttggcttttgcttcttttcattgaagctaaaaatataattaccagtattttcagaactaggattatatacattaggtgtttcattgatagctttttgtaaagtacgctgaccataagtagtagcaccatcttgacgatcccatttatcacggatcaaacttgaatttctgaaaatccgatccatcttgtggatgtcgcgcccacaccaaaatgctaagtcgttagcaaaagccatatcagcttcagactgagaattgtaaaattgttcccagccgcctcgcataaacaaagtgaaccttttacctgattttggtgattcttcagcacgtttaataatctcagtaactgatagatcaattgtttcatcgttgtcatcgatttcgggatgcagcggtgttactttatctttgccaaagcaaaattcataaagtgtagacatctctgattcatcaagtgattttatgactggctttccaatcgtgttacctgttagggcaaaaaatcgacctgattcatacatttcatagtttccatgtcttctatgcttacctggaatcttgcctttgaaaattgcatgaattcctgtacctgattgtgagacttccatataggagtcatgggttaaagatttaaaacgattaactaaattattttcgtctgtatctccctcttcataatcagtgagatcgccatcaatatggtcaatatctaaacctacaaagccatttgcaaaatagaaagctagtccatctgcttgagggtatttatgcaaagccctcaaagcagtatcaaagtcagaccaagttcgctgatcattggatttacctgcaccaaagttataaggatttttaggaatcttagtatatttttgtcgctcgggtagccactttaatttaaaaagtccccattgcttaagatttattaattcatcgggaatcgatgaataatctgtaaatttagccatctaaatcatccttaaaatggtaaatcattatcattaatttcagtgtcgctacctgcattgcccttgaatgggtcttcttttggttgagagccttgaagtgggtacttagttggtttccaagtatttacaaaacagctattctgcttacgcttttcacccttatattcattatcgttaacaccgacttgaacctgaacagttctgttttcacacatagccatgaaatcatcttgggttttaatgtctgcaccatcagggatgccaactgctttagcaatgtaatttagatctgatgacttgtaagaaccgctgtcattgccattagcatctttagcagtccacactctcacaaagagatgctgaccatgatgctttgcattggttttagccaattctggaactttgtctaagtctttacgaacgatcatgtcaaagaccatacattcatggccgccaggagacgcatcgcccttaactgagttgatgcccatttcataagtccctgcgggtaaaattgaagtatctactgccttcttgtaatctacgtttaaaaatcctaccattttttagttctcctttttttattagtaatattgaatgccgtctggttttaatacgccgattggccaaccagtatcgctattataaatttcaagaccgccttgcaaattggcttctttttgccacttttctggatcttttaaatacgtactttctaaaatttgattcatttcttaataaaacctctcttcttagcctgaaaatatgcccaacctggcttatatccatgcagctttccataaatagctagatctttaaaactagttaattcttcaggctttttagtagatatatagttaatatgaatgttttgagctttaataacctgcaattcctgttctttcttttgcttaatttttctaatttctgctgaaaaatcatgaccacataaaggacagataaccaattctgctctgatcacaccaaaacattcaggacaagttttaatcgctggaccgtcaacagtttgtccgtctctttgtggatgtttagcgcgatcctctagtgtccattttctatcagcatcaggtaaaccgaagcgctcaaaatttccaacctgatcaatgataactgcatgtttatgaggctgatatctcatcgctctcattgattgttgtaaataaaccacaagactttcagttggtctcaataggactacacatgaacagtcaggtacgttaaatccctcagagactaaatcgacgttacagaggacttttatttgtccttgcttaaaactatccatgattttatttctctcgttagagggcgttttagcatctgcatgggcggcgttaattcctgcatttctaaattcttgggccacaattttactaaagctagttgaatgacaataaataattgtttttctatctttagcgaatttaagccaggactttacgatgtcaccatgaataatgctttttgtgaaatcatccattgatttactggtatagtcaccagtgctggacttttttagtaagtctttattccctaattgatagccataaactgtaaatggtgctagtttgtgatgttcaattagccatttagttgttggtccttcaatcattgcggaataaatatctttaaatcctttaccagatagtcgccaaggacttccagtaaaaccaagtctagggacatcattatagtaaccaaagattttcaaataagttttagctcttgagtgctgtgactcatccacaattattaaattaggttttggaagtatttttaatctgttagctactttgccaacggtcataattgtgcaatgatttaaatcaacgccttgctgcttgaaagaatcttttatctgctttactagttcttggcgatggacaaagaataatacatgtccacctttttttactgttaatctagcaatttcactgattactactgacttacctgatcctggagggctaacaattaaaacgccttgatttccagctgctagagcatttctagccttatcaactaagtcttgctgataatcaaataattgaaacatttaatcatcttgcttatgaattttctgcatcatcttgatgatctcattggcatttttggtatgatcattttcttcatcgatttctcgttgaatgtttctgacaagaccagctaacacgacaccatgcccatgatgtatttgaatctggttgccatcatcgtttaaaccgacgataatgaaatgtttagttctgccgttaagaatatccatgcaagttgcacttactttgtcttccatttctttatccaactttaacttttcatttacattttcactaaacattattttttctccttaactttatctactgctttgtctaaatctgatttttgaaacttaaataaatcttcgactttgcagcctctacgctggtcaagcctattttttgcatatgtcccttcatcgccatcaagaattacaccgcgagttccatcatcaggtttcttaatcattcgtcctactacatcggataggcccattaaaacattccgaactgaatctcttagttccggcccatattgattgaattgctggccggaagctgtagttattggatgctctgtttcccatgctgtgatatatacgtttagtggcatgtcataaatccattcgataaatctcaagaagtaattagtccattgagaatagtgttgtaattcattgctaattccattttttgattctcggcctttttcttgaaaccaaattttttcgaaattggaaatatcatctaaaactaaattatcgtatttagttggatcgaatgactctaaccatttgtttagatcttcaattggtttcttagcgtcaatttgccatgccccagctaaatgacctgctaaaactttaaaggacttatcaaaacctaatacataagttttacctggaatgaatttagcagtagatgttttgccaattccttgttttccataaataagcacacgccagtttttcaacttatccaatgtttgaatatttatttcaggcattcattgatacctctttttctaacttttgccatttatatccacctgcataatttctttttcctcttaccacagcggagatatttccttgactaattccagtaatttttgaagcttggtttgcacttgaataggctgcaattctgtggctgtctgaagataactgaataataggagtactaacagcttgaataaatttttgagttctatgaccgtaatttaagttgtgagaatgtgaacaccattctaaatttgaaacatgattatcatctcttatttcatttaaatgatttatttcttggtatccatgaggattatttaaaaatgcttgagcaactaatctgtgaactttgaatatttttcctttaccatttttagaaagtctgaccattaaatagcctttttcgttaggtacttgcttcatcatctttccatagatggttatgtgagaattgccatgcttaacttttctagtcagactacgaatccttccaaaatttgaaacttcgtaaagtgattcaaagtgtttaattggcttccaaacttcttctttccaactaaatgctggcattattcttcacctgcgtcatgaatcaaatttttaataccctgaagctggttaagcacattgttagtaattgctttttcatatgctttaatcattacttgcttaaacatagcccactcattagtatttttgattgcttgaaaggcttgtcttgcttcagacgaatcaaactctgcattttcccatctagcagcaaactttaattgtgcttgttccttgatactatcttctaaccagtctttatcaatcatcgttatctacctctctatccaatccttcattttttactttaatgattgcttcttcgtaaattgatcgcactacattagcgactacttcacttggtgcagcagtaaatttacctggcaattctggcttatttttattaagccaccgcattgcacctgaataagttttgccattctttttagattgatagatcaagtaaattacccaatcatctgcatcatttttcattttctcaatccaattctgaaagtctttcagatctttattcatcttgcatgtcctttccgtcatagtagtctaggactaattgcttaatttcgtgattgtcagtgccattttcaaacatccacgcatacatctctgtggttgagtcaaagcccatgtcttctgcagctacctcaggttcttggataatggcccaaataatgaaatcacgacaagtactaaatttctcatcctgaccaatcgtgcagcgttcatcaccgtaataacaaacgattacatcttgacccttgagttcttcatccgctctttgattacggataaattgacgttcttttcttaactctttttctgattttgctttcatgtgttatactgtcctttgattatttacttgagaactaccacatcacggttggtagttctctttttgtttaagtcataaatagtagttactaaatcagtagctgcccataacttatccttggtttccttgctaagttccatttttgctcctttaagaaatccattgaaaaactgcgtcccaaaagccataagacaaaagactcaaggctaaaatcactacaccgataaaaatgtttaaaagcttatcatctaaatcgttcttacgaattggcttgttgaactcacgatagtagtttttgttcatttcatctcatgtcctttcataaaatctgcaagtgtttctttgctaaagagcagctgaccatccacacttgaaggaattaattcatcactgtaattcagtagccaatttctaaaggttgacttgctcacaccgcaatagttagctgcttcagttttattaaagtactgttgttgaattgctctagcgattactctttcaggaattgtgacttgcatacttatacaccttcaatctctagagatagttgagtgggctcagaacttaagagcctattaatgaaatattgctgacctttgcctgtaacttttgtagtaacagtaattcgtgaactgccatctgggttgttaactgttctttctttgactctgaataaaccgagttccatcgctttttgagttggttgattgtatttgagccctttagagcaaagatagtgatgttcacgtagccatttaagcagtctgttttgtcctgtttcataaccgttttgccgtagaatcttagctaattgaccaattaaaatatcatttttacttgtagcaactgcatctgcaaacaaagctttaggcttcatttgcttgttctccagcttcaatctggtgttttcattttgaagaattgcatagccacgtttgacaatctcttgtggattattccacttgcgttcaacttcaattaagtacttgcggtattgcttacctttttcagtacggctcatgagacagagttgttttgccatatcaatagtcaaggcgtagtcatcgtatcttcttaccgttccattgccactttgaacgacgtgacttttaggtgaagtcgtataatccacgttttcttcaaaatctttactattttgtttccaccaatctgtaaacttctttttaagtcctaatccttcatgtaggtctcttgctgaaacaagttgtcgatcattgtgaacttgaactttgattaattcttgcattgttaatgctcctttctatctaagattaaaatcactaatgactgttaagatgaatcgattagctgcaggattagtcttgcgacctgagacgtagtcacgtgcgtcttggtttgaaagcttatacatcttagctaagtcagtaatcttaatatcattatccttaagaaaattttgaaccagctctcggcctggcattgttgatggcatatgatcacttcctttctatatttggtaaactagattcatctcataattaggaggtgaatttatatgagtttttatgaatgggttaataccttagagcctttaaatactcctgaaggagatttagttgaggacattcagcgtgatagcaatttccctgtagaaattgattcttgggtagcattgtctacttatttacccgatgatgatttgattcaggagcctgctaagaatcttttcgatgcttatttagaacaaacacagcatcacactgaataggcttatccctgtttttgtatttgtgtttcaattcaaattctttataaaggccaaccggaatttgagttaacacttttctattgatcagttcttggagtaaatcttcagagctgatcttttttaatgtgtctttttgataagcatctttaaaagcaaagtcagccagatcatttgctaattcaataaaatcttctttatctttttcagacattgagttccactttttaggttccattccacataaataaaatttatacatttatctcaccttctttcatatttatttagtaagataaaaacatagataaaagcttgcattatttattctttggaataaaataatagtgtaagaaataaagcatttaaatagttccccaaccattaaaattgctatgtttctttagttgtttttttctattgatttaacttacaaaaattataataattccaaagaataaaaatgtcaatatttttattcaaaagaattaatttatttttgcaagtgctttttgaggtgcttacataatgatttttgacagaattaaagaattggccaagcaacgccatttttcaaatttgcaggaggtcgcaacagctgcaggattaggtaaaaaccttatttacagttggaaaaagaaaaaaccaaatagtgaaagcttgaaagctgttgctgaggttttgaatactactactgattatttaaacggattaactgataacccaaatcctaataatgattcagaggattcacacactcttacctggcaagacctagacatgccgtacggtggtaaaattcctgacgacttaaaaggaatgtaccgtgccctagctgagcaatatgtaaaagaccatcctgatagtcttaagaaggattaataatgaacgaagtaataacttggttaatgaattactgcatggagcatggtattggcgtggtttatcaaaagaaattgccagaaaccgctccaagcgacagctggcataatcctaaactaataatttttaatgcgaactactataaagttaacgagcggcctttcatgctggcacatgaaatcggtcatgttgtggaagaagttcccgagtattacaaacttgcttatctaggaatggaaaaaggagagttctcagctaatcgttttgcgattaatctgctctccctttactgcatggaaaacgacatttggtatgaaacttactatgattttgctcaagcgttcggcatccctaaagacaaatattacgtacttgagtttgtgtttgaatcaatgaaggagttttgattatgagattaaatcatgattgtgtaagagatgtgatgctatttattgaggaagaacaagaattaggaatggcactccatttacctgattttttaaatcaaaaaaagccggccaaaagccgacttgataaatacgatgctgaaactattaaatatagtttaatgaagttagatgaaacgaattatttaaatgataattgcgtcattactcaatatcaattgattgaatttgatgtcacctcaatcacatggaatggccataagtttttagataccataagagatcctaaaatttggaaaacaacaaaaaatgtagcatcccatttagagagtatctctattacactactttcaaatattgcaagtaatgtcttggaaagctacattcaaaaatttattccaaaagtctaaattcactaccgtcgatgaatatatagatattggtaggcttgtgacccaatcttttagtataaaaatgcattaattctggcgagacataatctattgattgtaaatcttcaccagaaatatgcattgtacttaagaatttattctgaccgtcttcttttgtgaaataaataatacttttcataattgtcacctcattgacattatacctaatcgtccacagtgacgttaaacctgaatagttttcggaggatatagaattttgaataagaagattttatcattattagcagtcggtgcaactctaggtggagttttatcagctcctacctcaacagtttttgcatcccgtaccaagtcagcaaaagttgcaagaaagcacgcgcgtgctaagaaaagagctactcataagaagtttaaagttccttacaaagctttagttggtgctcaaccaactgaagttgtaattactaagagagtcaaaatgtttgaatacaatcctcgactaaaaagaatttacaaacaaaatcttagttcaggcagagttgtaactgctactcaagcaaacaacaatgcttggattattactcacttaggcgctggtgaagtcaacaaaggatctatttgtgtagtcaaaggcaatggctggtttatgactaaagctgaacaagatagacgtttagaaaatgcacgtcgtagattcaatagttcacttgaaaatcaagttggttctcaagaatataacgctatgcgaaatgaattaaatagttatagaaacaatattaagaactgggtagaacattactaatcctaaaaaaacacccgcttaccgctggcacggtaaacgggcagacataaatgtatccggaaaatacaaaatattttgtagacgaatgccgactggcatcggcgttttcgtctaccctattttagcaaaatggaggtaaaaattaaaatgccaaaaagaaaaaatacttcaattaaagagtatgcattaaaatctggtaaaaaacggtttatgttccagatctatttaggatataacagcaatggaaaacctattattactagaagacgtggttttaaatcttatgctgaagctgaagcagcatataacaaaatgtctcagatcaaggcagatgattttgttaaacaaaaacaaattaaagttaatgaattgtttgaactatggtttaaaacttacaaagaaaccgtcaagcctcaaagtgctagtagagtatttgttaattacaagcaccatattaatccctattttggcaataattacatggatagcatcttagtgaaggatctacagaagtgggcagataaattagcaactgaattagttaactatcgtcctgtaatatcaattatgagatcactttatgagtatggtatgcgtttaggctacatatcagataactcaattagtcgaattattacaccaaagaaaaccactcgcaagcgtcgcaatgtggacgataatgtttattctaaagaagagcttgatacatttcttgatgttgctaaacaagtaaatcagtgtgtttatacatactttaaattactagcttctacagggatgagaaaaggtgaagctttggcacttacctggaatgacatcgacttggtcaacaatacaatctctgttaacaagactttaacaagtgttgaccacaaattaatcctttcttctccaaagacaaagaactcaaagcgttctattcccctctcagccaatttaaagcaagtactgctagattatcgcaagagtgagaaaatcgtctcagtcaagctatttcataggttaaacggcaactattggtcattaagtcagccaggagattggcttagagatgtctatgctaaagatcatgcattaaatgttaaatacgctaaagaacataagctagatgattcttatgttagagctaaggacttacgtcacatatctattcatggctttaggcatacctttgccactctcttaattgaaaacaccaatgttaaacctaaaacagttcaaatgttgcttggtcatgcaaatataaaaatgactcttgatatttacacccacattaataataagaataaagaagacgcaattaactctatttcacaactaaatatttagaataaaaaaagcacctttttagccattttttagccaaaaggtgttttttagtaccctatgtgttgatatatcagtatttatgcttaattgagtgaaacaatactaacttcattatttctttttcctttttctaggcataaaaaaagacaccatatcaaaggtgtcctttaactagttattgctgttgtcgttgttatttacaacttgacgacccttgtaataaccctttggtgaaacacggtggcttaagcggtattcaccagtagttgcatcatagtgcattgctggaacactcaacttaatgtgaccacgacgtgaacgtttcttttgtttagaagtatgtcttgcaggaactgccatttaatttgatctcctttattgtagtcttaagcttcagggtcatataaccccgaatcactcacgtagttcaatcatactattcaattgctaataaatcaagatttattctattttcttctcttttttattgaagaaagtgaccttgtgatccgttttttccttagtatctcgtccaaagaaccaagcaataatcatcccgataatcaccattaccactaacacaacaattagtggtaacctcaccttaaaaaagccaaaattaattgcgacaggtgatgtatttaaaacaacaaaaattactgcaattaaagccacaactgatccaataattaaatttctttgtttttccatctttttttactttctagaagcaaactttaaggaaatcttatcaccaatcgatggaaatagattatacaatttagccgctacagctaaactaagtggtaaatttaattcacgtttatcactgccaaagaagtgaactacttgccaagcaacatcatctggatccaacataaattcttgaacatttttgacataatttccagtcttatctgctacattaaggaaattagtataaactggtcctgggtttacagtcattaccttgacaccaaatggctttaattctagccgtaagacatttgaaaattgaattacggcagccttagatgaactgtaagcggctgacttggtagttggtaccttgccagcaattgagccaaaattaataatttgaccagtcttttgttccatcatgaccctacctactaaacgagtaaagtacatcaaacctaaaacattaacttggaacatattggtaacgtcttgcattttttggtccataaattcttcgaatttaccaaaaccagcacaattaactaaaaagtcaatgtgttttacttgtttagtaattgcattaaaggtttgttcaatttcttccggcttacccatatctgttggaaaaacatatgcttcagcaccggatagttctttagcttctgctgcaatttcatctaattggtcctttcttctagcaattaaaattacagtagcaccacgaccagcactttcaagggcaatggaacgtccaatcccacttgaagcacctgtaattacaacaactttatttcttaatgagtctttcatttttctgagcctttcattggaatattaatctgatcaaaatcattaactaatactgtattagaaaatacttttttagcctgtttttcgagttttttccctttagcacccatataacgagcagaaatatgatttagacataataatttaacattatctttccgagcaattttggctgcttcaaccgaagtagaatgataataatcatgcgccaatttttgttcatcccctgcaaaagttgattcatggactaaaacatctgcatctttagccaaacgagcaatacttggcgtggaacgtgtgtcatagatgaccgtcacaattcttcccggtttagtaggtcctaagaaatttttaccatccaaaacagtaccatcagctaaagttactttttcgccattttttaatttccccaaaagtggcccattaggaacattatactgtgctaacttgtcaattaataattcgcctggatgtgaagcctccactactctaaaaccaaaactaggtatccggtggtctagttgctccgtatacactcgaaagcccttatcctcacagattaaccctgatttagctaattcaacaaaccttatagaatatgaaattttagtccgagataccttaagagctgttctaacaaattcttcaataccactgggaccataaatagtaataggaccaacatcaccttgaaaagaacgagttgacaataaccctggtaacccaaaaatgtgatcaccgtgattatgtgatataaaaattttggtaacttttcgtaatttaatatttgttcttaaaatttgatgctgagttgcttcacctacgtcaaaaagccagatttcattcaattcatccagcaacttaagtgcaacactagaaacattgcgttgctttgaaggttgcccagcaccagtacctaaaaattgtaattccatgaaaatcctattctaatctaaaattttgaatgcttaacaattgttttggtaactaatgcactatagtattttgagccctttaaattagggtgagtatgatcaccgtagaaccagtcaggatgattcttcgagtatgaataccaatcaattattataagattatgataccgttttgcaccttgatttagcaaattattcactgaattttgccaatctctagttggaacgtgaacattaatccagaaaacttttctcttaggtccagcctgatgcattattcgatcaagatcttccattgagaaaggtccattagttcctaaccctattaagatattatctgctaaaactccttgactttgataactatctaataagccaaaagcaacattcaattgtcttgaaacagcagcatcaattaacgctttaggcattaatcgttttaaatcgttgctcgaaccggccattaccgagtcgccaatcgcagttacttgaacatgttgagcaaattgcaaatctaactgggaaataccatatttaacaaaggatttgttaataggatgctttttagtttgaagctcagcttcacgaataattttagattttttttcttttttctttttttctttttttaacttttcaattaatttagcattatccgttttttgttttttagaattctgattaattcgctgtgctaattggcttttattaaagtcttctgcttttactcctggtgaaatagcaatagctgctgatcctaagattaaaatcaaagctgctaaggctgcttgacctttcttaaagtaatcttttgtttcaaaattaaaaattcgagcaaaatattgcttcgttttatcccaggtaatcctacccattggtctttcaatcaaacgataagtaatttctgtaatcactaaaattaaaatcacttcaataaggtgatacagcattggattatcaccaatatttaccttatcttcaaaaaagatcattactggaaattgatacagatagatgccataacttcgcgatccaatccaatcaaataacctattagttaggatttgattccaatgactaccaggatgagcaattaccgctactaaaatacatacatctaaagtaaataacaacatcccgccagagtaagtaaaggcttgttgtggattcatccacttagagaaaaacattgctaacattaaagcaaatgaagcaaggcccaccaagtccagtatccagcctacttttcgttcaacttgctgatttaaactctctatcggccaaacaactgctaatgctgctcctaatcctaaagaaaagaaacgagtatcagttccataataaattcgattaatatcagcctttaaaaagtataggattgccatttctaatgcagaaacagctgatagaccaactaaaatccagaaaatattttttttctttttaaccaatttaactagtaaataaatgacaattggccaaacaatataaaattggccttcaattgacatcgtccataaattagtaaatggtgattcattagctgcaaaacgctcaaaatagctttgaccattatgaatttgccaaaaattaaatacatttaatagatttgcaagtacaacctgatttaatttagccagtaaatttcgttgaaagataaagatataggctgcacttaaccataaaacagtaattaattgtggatataacttttttattcgactcaaataaaaatgacgattattatatgatcctgttttatcatatgaattaaacatatgatctgtcaccaaatatcctgagagcacgaaaaaaatcggcactcccagatatcctcccataaaggaattaggatccaaatgataaagaattactccgataactgctaaggctctaaggccagaataccccgtaataaacctattttttttcataccctatctctactcttattgtacgaattcaaagacaaacttgccaatagccacatcatcaccattaacagctcctttttcacgtagtgcgtcatcaacacctaaacgcttaagctttcttgctaaacgcataataccgtcttggtgatccaagttggtcatttgaactaatctttctaattgttcacccttaacgataaattcatgttcgccaacttgctcaactgtaaattcattcttttgtggtgcctgatacttatattctttaatcttttgtgctagcttaggttgttcttcagcctgttcttgttcaacttcagttactaagttggcagtatctgacatcaacttatctacgcctttatgagttacacttgagatctcataaataggttcattatttccttctgcttttaatgcttttttaaactcagctagtttttcctcagcaccaggaatatccatttgtgaagctacaatcaattctcgcttctttgataaatctgtttcgtaatttttgagttcttttttaatggtatggtaatcatcaattgcctcacgaccattattaggatccattgaaactagatgtagaattactttggttctttcaacgtgacgtaaaaattgaattcccaagcctacgccttgactagctccttcaattaatcctggcaaatccgccattgaaaagtcacgaccatctggcaagataaccattcccaaattaggagttaaagtcgtgaattgataagcagcaattttgggcttggccttagttgttactgataacagtgttgatttaccaactgacggaaaaccaactaagccgacatcagccaataattttaattctaagcgcaaaacgcgatcttcacctggttcaccattttcagcaatttctggtgcagtattaacactagttgcaaaatggatattaccgcgaccgccgcgaccacctttagcaacgactagttcttggcccttttcagttaaatcaccaatcaattcattagtgtcataatcatatacagtagtaccaactggaacttttaaataaagatccttagctgcacggccatattgtgatttaatacgaccattttcaccactatccgccttaaacttacgccgatagcgaaaatccatcaaagttcttaagccgctgtcagcaacaaaaataatactgccgccacggccaccatcaccaccggctggaccgccattagggacgtatttttcatggcggaaagccaccatgccatcgccgccttttccggcttgtacttcgattttagtttgatcaacaaatgtaggcatgtatatctcttccttccgtcttaatctagcttttaatactataccacagaaatacgcatgatatcgcgttttctcggattacaatgttaattttaccgtttgtgcttgagtaagcgttaatcctgctctacgcaagtcatcaattgaagcttctttaattttcttcaatgaaccaaattcgcgcaataatttgttacgacttttaggaccaattcccttaatcgaatctaaacgactggacaaagcatttttagcatggcgtcttctatgaaaagtaatcgcaaagcggtgcacttcgtcttgaacgcgcgtcattaaataaaagccctctgatttgggattaaggggaatcagtttcaaaggaataccgttgatgggatcgccaaataataaatggtttgttctgtgcttatcatctttaaccatccccgcaactgggatattcaaatttaattcatttcgtaaaacatctaaacaagcatcgacctgaatttgaccaccatccatcaaaatcaaatcaggcattcttttatgctcgcgcaacagtctaccatatcttcggcggacaacttccctcgtgttgcgtacttcgtcgccaccattttgatgttcaacctcaccttttagcttatatttacgataagctgttttttcgggttcaccatctttaaaaacgactaaagcagagactgggtcagcaccttgaatatgggagtgatcaaaactttcaataaagtgtccatatggtaagcctaaagcatcaaaaatttctttttgagcgcctttagtttttcgattacctagttctaataatctaaacttatcatctagctttaacttagcattatccttcgccatgtctagcaatgactttttctgccctcgttgcggtgttctaacaggtaccttcaaaacctcagctaaagtagcattatcaaatccttcaggaatcagaatttctttgggcaaaaccctatttctttgcccataaaattgcacaataaaggaagtgaaagcatcttctggatctgtggcatctgtcaaaggaaacattctggtttctctacgcaataactttgcttgccgtaaaaagaagatttgaacagaaatccaagacttgtcaacgtaataattaaaaatatcacgctgcgtattatcattggaaataattttttgtttttcaaccgtttcttcaatatatttcaattggtcgcgaatttcggctgctcgttcaaattcaagattgctagctgcttgagccattttttcggtcaaactctgcttaacactagcaatatctccattcaaaaagctcttgatctttttaatttgctcttcgtattctttttgtggcacttttttaaagcatgcacctaagcactgccccatatgatagtaaagacaaggtctgccttgataaccatgacagcgccttagtggaaaaactttttgaataaacttcaaagtggcctgggcagcatatacattaggatagggaccaaaatagtagccaccatccttatgaacgatactagttaaccgagtttgcggatcatgttcacgcgtgatttctatgtaaggatatcccgtaccctgctttaattgaacattataataaggttgatacttttttattaatgtaatttcaagtaaaaaagcttccttatcagttgatacagtaatgatgtcataatctcgaatttcacgaactaattcagcacgacgtccaacctgtttactcttaaaatatgagcgaacccgattttttaaatttttagatttaccaacatatataaccgtaccgttaatatctttcatcaaataacagccggttttttctggtaaaagttttagtttattctcaattaattgtgttgccattatctcatctcactgaaaaaatttgcatttaatagtttaacacagactgtttaagaagatcttaactttgcttatagaaatagctattcggtacaaaagttgatatattaaaagaaataaaatttgaggagaacttttgatgactaatctagtttttgacttaattaaccaatttggctacctagccatcagtttgctaattgcaatcgaaaacatctttccccctattccatccgaagtaattctatcgttcgctggctttgcaacccatcattctcaaatgaatgtcttcggtgtaattattgcttcaacaatcggcgcggtagttggtgcactagttttatattggattggcactttacttaatccagatcgattagaaaagttgttcgatcataagttattcaaactacttggctttaaaaagggtgatgtacaaaaggctatcagatggtttgataaatacggtaccggtgcaatcttctatggtcgctgcatccctgtagttcgtagcttaatttcaattccagctggaatagccaaagttaaattacctaatttccttatttacactagcttaggcagcttactctggaatgctattctagttggtcttggttcctatatgggtgaaaattgggaacaaattgtgttaatttttgaagaatactcattaattattggaggacttattctaattgctttaatatatttttcctgtaaatggtataagcaaaaaattaaagctgattaattcaaacgctctataaaaaatatagagcgttttcttcttttaaaaattaaaaatatcatgtaaaattaatctaatctataataagggaagtttgcgaatgaaatttaatatttttaggaaacaaaatgttgagaactatctcggtaaagacattaagttctccaaaacaatgaacgccgttgatttaatgtctcttggcgtaggagctgtcatcgggaccggtattttcatcttacccggaactgttgcagccacattaactggacctggcgttagtttatcctttgttgttgcagcaattgtttgtgctttagctggaatgtgttatgcagaatttgcttcagcgatcccagtagctggttctgcctattcatatgggaatatcgtttatggcgaatttacaggctggattatcggttgggcactgattttggaatacatgctatctgtagccactgtggcagcaggttggtcatcatacttcagttctttcattgcaccatttggtctaaaaattccacacgctatttctggtcctatgaatcttaacaatggcgtttattttgacttggtttctgttttaatcattttacttatcagtatcctgttgtcacgagggatgaagaactcaattaaaattaatgtcgtagctgtttttattaaaatcgccattattttaatttttatttttgtaggcttacagttcattaaacctaacaactatcatccgttcttgccatatcatttttcaggagtcatcaaaggagcaaccacagtcttctttgcctttcttggctttgatgttgtttcatcatcagccgccgaggttaaaaatcctaagaaaaatatgcccctaggaattattggcactttagctattgcagctgtactttattttggcgtttcaatcgttttaacgggtatggttaattataccaagctaaacgtatctaatcccgttgcttttgcattgcaatatgttcatcaaaactgggtagcagagttattatcatttggtgctatgctaggaatggctaccatgatgctgacaatgatctattcaagctctcgcttaatctatgctatggcacgtgatgggctattgcctagtgcattcagtaaattagataaaaaacataactctcctcaaaatgccttagtcgctgtcactattattattgcagcaggtgcagcattcttctccgttgatcaactagccaatttggtcaactttggtacactttttgcctttactcttgtttcctttggaattctaaaattaagaaaaagaacagatattgttaacgatggctttaaagttcccggatacccatatttgccaatcatttctggtttaatttgtatctttatgatttgccatttaagttcagaagtttacttaatggcagctatttggttaatcatcggtgctgtaatttactttatttatggctaccaccatagtcagcttgatcatgattaacatcagtaaaaattatgtaaagaaaagtgtctgggaaaaaactagcttccagatgaataaaaacgatcaagatttccttttttaagaatcttgatcgtttttttgttctctttaaaatttttaacaataaaaatcggcccttcagccaccttctttgacaatatttgttcaaattcatcatcataaaggcaattccgatatcggtttcgaccttctctttacctcgcaggtgcgttctgcgcatgccaaatacgttcttcaaatgtccgaaaactggctctacatcatattttctcatgccatagatgtgtctgccttcttcgctttggagaacttcttttgctttttcttttaaatattgccagttaggattatagcgaacttggcgctggcggccgctagctgttttagccaattgttccaattctggcgttagctggaactcgtctgcctcataaaccttaaaatcacggacctgaccagtagaacgatccttgcgctggctgtaatatttgaaattgaatctgacgccatgatgatcaatgtaataatcatctttttcattgtagtaccagttgattagcttagttggatcattcttatactttttggtctgttctttttcatacatagtgtagggaataaagtacttcttgtctggatatttttcctccagcatcgaataattgtattcactgccatagccagcatcggcgacgattttgtcaaacttgtccaacacggtcatttgatccaaaaccggctccaaagttttgaaatctgtcggattaggaaagatggcataatcaactacatattgatcggtcgtgactgcttgaatattgtagccaggctttaattgaccatttttcatgtggtcttccttcatatgcataaaggtggcgtcatgatctgttttggaataactgttgcgtccggcaaagatctcttcggcttcttcatatttttgcattcttggcacataatcttttcttagccggtgcagaatcttttttagtccacgtcgcttggcttttcgaggtgaaccgccaggaatggctttgttttcctgctcaatctctttagtcagcttgttaatttctgcttcagtttcttgagctaattcctttagcccctgactagtttgaactttttctttttccatttctttgactacttctttagtaatcaattcatcataaagttcaactgcctggcctttcagcttttcatgatacttttcaaccgctttgcgccagacaaatgtatagcggttagcatcagcttcaatcttagtaccatcgataaaagcagcaccttcattgattaagccttcatcttctaacaggttagtgaagtagataaagctctttttaatcagttcattggcatggctgcttgatctaaaattattgatagtatgatatgaaatcttttgctggtcagccaagatcatcattggcagattttcttccagcatcaactcaatctttctgccagaaaaaactcttctggagtaagcaaaaagcagtattttgagcatcatggctggatgataggctgggcggcccgttttagcagtcttgcctactaaaacatcttctggaattgaatctacaaaccagctgatgacattagccaaatgattggccggaatggcaaaatctagattaagtgttaaagcagtttgacctgtgatataattcttgtacatgttagtttccaccttttttattttgtgatgatttaataatatcaaggctggagctaaaagtatacaaaaagagcgttgaaacaaaaattcaacgttcttttttcatgatctgagacttagttttttcccagacactttttagctctgtttgaactagttaatttgattaattgcctgaccatctttaaagaaagacaaaacattattcgcagcttctttagacaaattaaatctagcaatgtgagtagctgaaccaacgtgaggcgtcatgatcacattatccatttcaaccaattcaggtcttggatgcggttcgttttcgaaaacatctaaggcggcgcctgcaattgaaccattctttaacgcagcaattaatgcatccccgtcaatcaacgatccacgagcaacattaattaaaaacgctgtgtctttcattttctttaaaaagtctgaattaaccagatgatatgtttcagctgtagcaggagtatgtaaactcacaaaatcagcttcttttgccaaagtatctaagtcaacatatttagcatctaattctgctgcaatttgatcatctacttgatgacgattatgataaataattgtcataccaaatgctttagcgaacctagcaacttgttgaccaattcgacccatacctacaattcctaaggtctttccttcaatggagtacccttggttgtcgtactcatcggcatttaaaaagacgccttcacgcaaagcatcgtcataataatgcaatctacgagctgatgccataatcattgtccaggcaagttccgccgttggacgcaacacactcttagggcaatttgaaacaactattcctttttctttagcgtattcaacatcaacgtgatcaaagccaacgccataagttgaaattatttttaaatttttcgcagcatcaatcatttctcgatcaaaagccatctttgctacgatcacaccatcatattctgcaatatgatcaagcacccactcacgatcatcttctggtcgatgtcctactggaccgatatcaacttgacaaatattttttaaatcagttaaggcctcatctcttaagccacctaaaactaaaacttttgctttattcattatttttagacctctattcaattttcatcttaaagtaaaaataccactatttgaaagagaaaacatctactttaatattttattgattgcaactgcaacaccgtcgtggtcacaatcagccgtaacttcgtcagcatgttgctttgtatattcaacagcatttcccattgcgatacctaatccagcataagttaacatcggcatgtcgtttgcttgatcgcctagggccatcacattacttcgatctatttttaagtagtcacatagtcttttcaggccagtccccttatcgacaccggcagcggttgcttcataataaaaaggctcagtctttgaaaatacaactcgatctttcatcatttcaaataaaggagattctattttatcatctaaatagtctggatcatcaacatacatacatttgatgattggtatctgcttcatttcttcttgtgtacgatatgagacttctaattttacgacccgtgaattataaattgtataatgtcccaaatcacggctagctgtataaattcgatctaacgatacgctatgaaaatgtaagtttagctttcgcgcaattgtctctaaatctacataatcttcatattttagcccctgtttgaaaataacctgccccgcggttgattctacaactgcaccattaaaactaactacatactgattttcttggccattaagccctaattcatctaaataacgttgagtacctgacaaaggccgacctgtgcaaattacgatttgcttgccttgtttttgagcagtcaaaattgcttttttaactgctggtgtaatctccttcttagaattaactaaggttccatcaatatctatcgcgattagcttaatttcttccattaccttttcccttaaaacaaagaaagcaccgcttatgcgatgctcctattaaacagccatggtctgcgtattttcttttaacttgaccaaatcagccatatcatcagcactgatttcaaaatcgatgttcaagttttcctgcatttctttaacattatcactcttcggcaaaacaatacaacctagctgtaagtcaaatgctaacattaattgagctggactaacatgatacttttcagcgtaagtcctgattcttggatcctttaacaaacgaccatgtgcaagtggagaatatgctttaatctgaattcctaaatttttacattatttcatcaaatcagttggcacatttcctatatgaacttcgatttgattaactactggcttaattgagctgttattaacaatgttagctacgtcttcttgtaaaaaatttgaaacaccaattgatctaactttaccggctttaagtgcttcttccattgctctccagttttccagattgccttcaaagtgacgatcattaattctattcacttcaatccaaggttgtggtgaatgaattaacaacatatcaatatattccaaactaaatcgatctaaagcgtcatcaattgcttttttgtaccttcatagtctttaatcgaagttggtaatttagttgttaaaaaatatcactactctcaacatcagagttccaaataccttttcccacaccactttcattgccatagtctttagcagtgtcgaaagcgcggtaaccaacattaatcgcttgacgaattacttttcgtacatcatcgttattaattagccaagttcctagttgaattcgaggaacctctactccgttattgagcattaaagttttatcagagtacatatatacacctctacattttactaatatgtctctgtttcttaattcctgtatttatatagctaataacaattattaaacaataattgtttttttcagccatctgttaatagcatacaacaaaattgttgcaaatcctatacatacattttattttttgtggttctgttatattttctaattaaaatagtagcatcaatcaatgctgctaggtttataaagattatcaaataatttattttattattctatacaaaattaatattttcgtataaaaaaagaaagggctgatgatgtcctatcaactctttctcttcagtctcttaattcccaacacctataataccagcatttatcatttaaacaaggataaaaaacatcttttacttactaaatattatttttagttttcacattatagttttcatcacatttttaaaaagtctagatgttatattacaaaatgattacaagagcaatataaatcatatagttcactattagctatatgcaaatactatattttttgagcaataagctgcaacaatttttgagcaatctttcgcttactcattttaggccatttcttagttgacttatttttttgtaaaatcgttacctggtcttcatcattgccaaaaacatttttagaaacgtcatttgctacaatcatatcggcaccttttgaagatagcttttttgcagcattttgtagcaaattattcgtttctgccgcaaagccgacaactatctgccctcgctgcttgtggctagcaacttcgcgtaaaatatctgtcgttttaactaaagttagagtcaaagtttgttgatcagcttgcttttttaatttatgatctgcaacttgtttcatgcgccaatccgctactgcagcagccataattaaaacgttactatgcttaaattcttttttgactgcaactaacatttcttcgctactagaaacatgaattaatgtaatcctaggattttgtggcaaaggcatacttacattaccatatattagctttactttcgctcccatcgctgctgcttctgtagctaaggaaatgcccattttcccactagagcggttaccaataaagcggacgggatcgattgcttcttcagtaccaccagcagtaataacaatattttttccttgcaaaacgttctgttgttcagtgaaatttttgatccacgccacaattgctcctggctctggcattcgtcctttagcagcatagccttctgccagcatccctactgcaggctccattatttctacaccatgttctttcagaaaagctatatttcgctgtgtagctggattattccacatttggtcattcatggctggtacaaccaatttaggtgcacttgtagctaaaattgtagtgctagctgcatcgtcagcaattcccgttgccattttagcaataaaatttgcagtcgctggtaaaaccagagctaactctgtccaacgcgctagatgaacatgtggtatgctagcctcattttccttgctccataaatcatccaaaacaggatactttgttaaagctgccagtgtattagtagttacaaaatgctctgcatttttagtcattactatttgaacttgatgacccgctttttctaaatcgcggataacgttaactgccttataatcagcgattccacctgtcatataaattgttattcgactcattttaccattcctcgtcatctaaacttatttttattttatcattgtccacttaaatagtagacccggatttaaaattgaagtgcaacactaagtgttaaacaaaaaggccatgaagacctaaacttgaagtgacgaaaaatcaagaaaggaagatctttatgaccaattcaaattctagcatttctaagcactatcatcaattaaccagcgtacaacgtggacaaattcaagcaatgctggattccggcataacttcccgtactgttatcgctcaagaagtcggctgccataagtcgacaatcagtcgcgaaatcaaacgcggaagtgtcctgcaaagagacagcagctatttattgtatgagcactattacgctgatactgcacagatttattatgagaagcgtcgcaaaaactgctatcagcgcaatccattgaagcattatgctgtctttttgagaatgctctccagacgctttaaagctaaatttgatgccaccagcatcgatgaattcgttggtgaattcaaaaggactatgccaggctacccttgtcccagcacaccaactgtctatcgctatattgatcagggcttgctggacataagcaatattgatctgcctatgaagctcaaaagacgcaggaacaagcgtcatcacggccatagcggtcatgctttgcacaagaagcatcttggcaattccattgaacagcgtcctaaagagattgaagacagaaaaacgccgctgcactgggaaggagatctggttaaaggcgtcagacgcaagaatcagcctgctttaatgactttgaccgaaagaaccacacgctttgaagtagttatcaagattcctgactatcgggcaagcacatgccaaaggctgcttcaaaatgagattgacagacatcctgcctggtttaaatcgatcacgtttgacaatggctctgagtttgcggatatgaccgagatcaaaggctgccagatctacttcgcccacccatattctccatgggaaagaggcaccaatgagaactgcaatggacttctgcgtcaattcttccctaaaggcaaaagcatgaaagataagtcagctgcttatgttcaacaggcaactgatgccattaaccgcaaacatcgtcgaatccttcaatatcacacagcagaagaactcttcaagcaatatatttcctcatagcctaactgttgcacttaatttgacaattcaggcttaaatagtagaatattgtgttgggagttatatttggaggaaaaattgaaaaatatgcaaaaactacttttactaactatattcttacttagcttatcggcctgcactaaaccacaatcatcctctgtaccacgtgataaaagtgccactacaatcaagattgttgataggaagcttgagttgcatcagcccactaaaaggccacttcaacctttaaatggaattttgcctcattggctgcaaatgccagataaatctcagcctaagccagcaatttatactaatttgaatactgttcttaaaaacaaatagggaaatgattagtttcatcttccctatttttgagactgtaaaatagtttgtgtaaggatgaatgattccttaaatttatttctttaaacattagaaaaaggagttcctttctcgtatgattggtttgaacaaaaaaaacacatacagaaagaagaactccttcatgaatgattttaccaaagattttgctcaagctctattcaatccagacaaaataaatgatttattgcgcaaagaactacaacaggctgttaataacttgctagaagctgaattgactgcctttctgggctatgatccctatgccagaaatggctggaatactggcaactctagaaatggtgcttatttccgcaaagttgatacgcaatttggcccaattgaagtgcaagtgcctcgggatcgcaacggtcaatttcatcagcacacgctgcctgactacaagcagcactctgatgttttggaaagcacgattatcaagctatactccaaaggcgtaactaccagagaaatcgctgacttgattgagaaaatgtatggcagtcattatagtccagctcaagtatcaaatatttccaagcagatgctccccaagattgaggcttatcacaagcgcaagctaagcgacaagtttttctgcgtctatttggatgcgacataccttcctttgcgccgagaaacatttgagcgtgaagcagtctatattgccattggcatcaagcctaatgggcacaaggaggtcattgactactgcattgcacctagcgagaacattgaagtctggacagatatgcttcaaaacatgaaatcccgaggcttaaagcaagttgagctttttctttctgatggtgttgttggcatgaaaacagccttggccaggacttatcctaaagctcattttcaacgctgtttggttcatgtcatgcgcaatatctgcgctaaagtacgcgtcgacgatcgtgaaaagatcatgaacgaattcaaacaggtgcatcaacagacaaacaaagaagaagccacagctgtcctgcatgacttctataccaaatggggcaaggtttacagccatgttatcagaagcttgaaagacatagaaccagatctgctggtcttttataactatcccaagcagatcagagcttcaatttattcgactaacatgattgaatcatttaacaatgtgatcaagcgcaaagctaagcctaaggcagagtttccaactgaacagtcgcttgatgcttttattggtattcaggcaatgagctacaatgaccgttatttcaatcgaattcataaaggctttggtcaggttcaggacaccttagaatcctactttgattaaataaataattaaaaaatcaatttacgagaaagaactatttacacaaaagatttgacagtttcctattttttgttcaatttacaagttgctttaaaaatagttgttttatattaatgagtaatttaaaatttatataatacagaaaggaactttatatatgccaaatttatccagtgatttaacttcaactattaatgagagactaaacaacttgaccgcatctaaaattcgagcatttgaccaaaaggtctctgaaatttctgggattattaagttaactattggtgaacctgatttagcgacacctgatcatattaaagatgccgcaattcgtgatattcaggctaatgattcccattatgctcctcaagctggtaagccagaactacttgaagctattagcaattaccttgaccgctcaattggtgtacattatgatccaaaaagtgaaatctgtgtcactgtcggtgcaacaggtgcattaaatgatgtctttatgaccttgcttaaccccggtgacaaaattttggttcctactccggtttgggctttatactttcagctaattaaaatgactggagcaatccctattcaagtcgatactaaaaaagatgacttcatcttaacagctgaacatttacgtcatgttctcaatggtcgcggtaaaggtgcaaaggcaattattttaactgatccttctaatccaactggccgcgtttattctgccacagctctaaaagccttagcagatgtcattaaggaatacaaaatcttttctgtaactgatgaaatttatgcagaacttgtttatggcaaagccaaacatcactcactttctgaatacatccctgacagaaatattttgatttccggtttatccaaggcttatgctatgactggctggcgtttaggctatattgctgcccctaaacaaatcatgaagagcatccgcaagattaattcatttttagttacttcagttactgataacgttcaaatagctgctgtcgaagccttaaacaatggtcaaaacgatcctaaaaaagcacgtgaaatctacgaagcacgtttaaactttatgcaatctggcttagaaaagttgggctttgaaatggccacaccgcaaggagcattctacatttttgctaagatccccgaaaaatatggcaccaatgatgaacaattcgcttttgagctggctcaaaaagcaaaagtcggtgtcactcctggtcgctactttggcaagggcggtgaaggttatgtccgtctttcttatgcatcatcaactgagcaattaaaagaaagtttagctcggattagtaatttcgttaataatttataattcagataaaaaaataagtgatctcaattaaagcgagatcacttattttttattatattgatttattacttatcccaagttgaattttctgcagcatcttcagcagccatcttttcaagacgctcttcggttgcctttacactgtcttggtacttttcctcaacttcgatccccaagtcagctaattgttgatcagctactggagctggagcatgcatcattggttctgaagcagaagcattcttagggaatgctgaaacgtcacgaatattatccttatcagcaagcatcattgcaaatcgatcaagaccgatagctaaacctgcgtgaggtgggaagcccatgtccaaagcatccatcaagtaaccaaattgttcatatgcacgtttcttagtgaaaccaagtgccttaaacatattttcttgaattgagcgcttgtggatacggattgagccaccgcccatctcatcaccattcataacaatatcataactacgtgcgtgagccttatgaggttcagtagttagcaacttaaccccttcatcatctggcatagtgaatgggtggtgagctgctacccaacggccaagtccttcatcgtattcaaataatggccaatcaacaacccaaacaaagtcataaacacccttaggaacaataccagtttctttggcaaattcacgacgaaggtggtcaagtgaatcacaacataccttccacttatcagttacgaatactactaattcgccgccttcaagatcaaattccttcttcaaagcttctttgttctcatcagtcaagaagcgagcaacagggcctgaaaattcgccatcttcaaatttaacccaagccaaacctttagcgtggaaacgtttaataaagtcagccttcttgtcaatcttcttacgtgagtattcttttgcaccatttttaacagcaattcccttaacaaaaccgccatcagcaattgcaccggagaagaccttaaagtcactatccttgaaaattgggcttaagtcatgaatcaacataccgtaacgagtatctggtttgtcacagccatacttgttcattgaatcagtccaagtaattcgcttaattggagttttaagatcaatgcccttgacatctttcataattttcttcaaaagaccttcagtataactctgaatagtttcttcatcagcaaatgacatttccatatcaatttgagtaaattctggttggcggtcaccacgtaggtcttcatcacggaaacaacgagctaactggtaatacttgtcaaatcctgcacccattaaaagctgcttgaacagttgtggtgattgtggcaaagcgtagaaactacctggatagattcttgatggtactaagtagtcacgtgcaccttcaggtgatgacttacctaagattggagtttcaatatcaataaaaccattttcatcaaagaattcatgagtagcacgcaaaatctttgaacgtaaaataattgcttgttgaacttctggacggcgaagatcaagatagcgatactttaatctagtttgttctgagacttcaattccatctttaatttcaaatggagggttcttagccttgtttaaaataatgatttcagttgcatcaacttcaacttgaccagtcttcatgtcagggttaacttctgaacgcttaacaactttccccttaacttgaacaacatattcattaccaagtgaatcggcaatatccattaacttcttaccagaatctttgttaacaacgatctgaaccaagccttcacggtcacgcaaatcgatgaaaaccaagttacctaagttacgtacacgttgtacccaaccatagagatttacatcttgaccgatgtatttttcagtaatattgccacaataatctgttcttttttcgatcttttccattgttactagtccttcaattcatccattattttagtcatgttatttagatcttcaagacttaaatcgattgtcttgccatcagctaaacgtttaatattcaaaacgccgttagccagttccttttcacctaaagtaataacatacttagcaccttcacgatctgccttcttgaattggttctttaacttcttctgattgacatcaaagtcagcttcaaaaccttgattacgaaggctacgtgcaatttcaattgccttttgtgcagtaccgtcaccaatattagtaataaagaaatcaataccgcgtttctcgaataatgcaggattttgcttttcaagcactaacatcaatctttcttcgccaatcccgaaaccaacggctggagtagcgggtccattgaattcttctaccaagtgatcatatctaccaccaccaagaatagtagttgcactttcccataagctcttatcttcaaccataaattcaaagataattccagtatagtaatcaagtccacgtactagatcatcatcaattacataatcaataccaagttgacctaacatcttcaagattgcgtcaaaattagcttttgaatcgtcatccaaaaattcacgaatcttaggtgccttaggcaagaacttcttatcacgttcatctttagaatctaaaatacgcaatggattatcacgcaatcttctttgtgagtcttctgataactcatctttcaaaggagtgaaataattaaccaaagcatcatgataatcttgacgtacttgctcattccccaaagtgttaatgtgaagttggtaattcttaacgcctaactcacccaataaatcatgtcccatcatgattgtttgtacatcacttaatgggttgcttgagccaaagctctctaccccaatttggtgaaattcacgttgacgaccggcttgtggtctttcatatctaaaagttgattccatataaaaaacattaaatggcttaacaacttctggcgcatacatcttgtcttctacataagcccgcactacgcctgctgttccttctgggcgaagggcaatatggcgaccacccttatcatcgaagtcgtacatctgtttttcaacgatttctgaactatcgccacttgaacgagcaaagatttcataattttcaaaacttggtgtgcgaatctcacgataatttgcgcgattgaagaaatttctggcagtttcttcaactttttgccatgaaccagattgatcaggcaaaatatcaactgttcccttaggtttttgaactctcatttaatcatcctttttatattttgataacttgattaaaaataaaaagcgcccttgaacttaatcaagggcgcttagattagcacggtaccacctttttggttgctgcgattaacgctcgccaaacgatccattatctgttaaaggtgtcacagaccgcgatctatctactctctcaccacaacgagcagtctctttgaatagatcattgctaatccacattctttgtcatcgataattcttacttagcttatatttttctcaagacattgtcaacctttgcggtctcattttttcgctaaagatctaacacaatcgtgaatggaccatcgttttctaaactaacttgcatgtcagccccaaactcaccagtctcaacgtggaaaccgtcattttctagttcttgattaaagtcttcccaaagttctttcgatcttggtggacgcatcgcatcaacaaaactaggacggttgccttttttagtatttgccatcaacgtaaattgtgataccgacaaaatttctccgttaacatcctttaaagacaagttagtcttcccctcctcatcttcaaaaatacgcattttagctattttatcagctgcttttttgattactggcaattcatcaccatttttgatgccaactaataataaaaagcctttaccaatcttgcccacagttttaccgtcaatatctacttgagcatgatttactctctgaattacaactcgcattaattatctgacctcttagtttcgtatacgtctggaatatcacgtaatttactcaaaatttcatctagttgatctgcatcccgtacagcaactgtgacatacatatgtgcaacattatcttcgtttactttaccagagatattattaatattcttagtaagtgagttcaacttattaataacgtcactaagcagattggaacgattgtaaccaaagacttcaatatttgcattaaaggattgaacactattttcctcaacattttcccattcaacatcaattaagcggccttgttcttcagcttctttggtgatattacggcaatctgttcggtgaatagttacaccgcgacctttagttacatacccaataatcttgtcacctggaactggattacaacacttagctaaatgaagcattaagtcactaacgccttggatcatgacgccatttttatgcttaaccttcattgtagtatttgaattcttcttaggttgttcttcttgaactgcttgttgtccagaattcaaaatcttttcttccagctctttttgtttttgattttcttcctcacggcgcaaatcaaccgtcaagcgattaaccactgcttgagcagaaagatcaccaaagcctactgccgcatatagttcatctgcagtgtgataattaaagtgctctaatagcttttcaattcgatccctggccataaattctttgggtgaaagatcctcatcgcgcaacatatcagcaatcaattgttcaccatgctggatgctatcttctctatcctgacttctgaagtagcgtctaatcttgttgcgtgctcttgaagtcttcaccatgtcaacccagtcacgcgatggcgctgcattagtctgtgtcataatttcaataacatcgccattgcgtaatttatagtccaaaggaactaatttgttattaactttggcacctactgcatgactaccaacttgagtgtgaattgcataggcaaaatctagcgtaaccgaacctttaggtagttcatatacttcacctttaggcgtaaaaacataaactctgtctgaaaaaatatcacttttaacagacttcataaattcaccggcatctttagtttcatcctttaattcaaggatttctcttaccatatccagcttttcaccagaggtactttgctcaacaccagtaaaattgccacgcttataagcccagtgtgcagccacaccatattcagctactttatgcatttgttcagttctaatctgaatttctagtggacgaccgccaggcccaataatggttgtatggagtgattgatagccgttaacctttggcatagcaatgtaatccttaaaacgacctggcattggcttccattcagtatgaacagcacccaaaacagcataacaatcacgcacatttttaacaattacacgtacggccaataagtcataaatctcatcaaaatctttatgcttattaaccatctttttatagattgaataaatatgcttcggacgaccataaatttcatatttaatgcctaattcatttagagtcttcttcaaagtcttgattgtatcggcaatatatttttcacgctggcttcgcttgacatccatcaagttaacaatgcggtaataggcttcgggatttaagtagtggaaagacatatcttctagttcccacttaattgtcccaatacctagacgatcagccagcggtgcataaatatccattgtttcggaagcaatacgccgctgcttatcaggtcgtaagtgttgcagagtatgcatattgtgtaaacggtcggctaacttcaccataattacacgtagatcttgagccatggcaatcaacattttacggtgattctcagctaaaaattcttgatgagacttgtactcatatttgtttaacttggttacaccatcaacaataaaagctacatcttcaccaaatttttccttcagctcatcatttgtaactggggtatcttccactgtatcgtgcaaaaagcccgctgcaactgtatcaggatctaagcctaatgtagctaaagttccagccacttgcgttggatgaataatataaggttgtccagacgcccgtttctgtccagcatgagctttattggcaaattcatatgctttttcaacaaaggccacctggtcatcattcatatactttttgcaggtatcaattacctgatcatgcgtcatttcaatgtatttggacattatgatcatcccctctagcggtaaatatttttattcattaagccaaaagcttcaattattaagtaaattaaaccaaacattaaattatacaaagcaaaatgtggcaacattgctaagcagaaaagcacaggtaacaagaaaatccaccacttggacaggttaagtttaataaataaattgcctagatggtatgcaatgatgctgttaataataaaaaacagaattgcttctcgccacactaccggcacacggcaaatgctaaagatatacggcaaaatcattaccaaaatactccaccagacaagtgacatccagcgatgagaattcaacttcctgacaattggaattgcttcgattttatttcctagttttttcattaaaagattgtgcctctcatcaaagtttaatttaattgataatattttaccatatttatttttcttttctagtaattgctagtccaatccagcgaccttgacgcatggttaaatcgaccttaaagccattctcgtctagagccttttcaatcttaggcaattgcaggtagtcaattccagaaaagataacttgaccatcgtcgtttaaatgactatccatttgtggaatcaagtctagtaaaatttctgccaaaatattggcaacaatgatgtcaaacttgcctttaacatcagctaacaaactagtcttttgagtgtgaatattattaatatcgtttaaggctgcattttgtttggctgcagtcattgattcatctgaaatatctgtggctaaaacgtcagttgctcctaattttgatgcagcaattgccaaaataccggaccctgtaccaacgtccactacattcattggcttaaccattgctctctctaggcccatcattgctaattgagtagttttgtgatttcctgtaccaaaagctaagcctggatcaagcttaattaattgctggtccttaaaagcgggtttgtaatcttcccattcaggcacaattgccaagtgacgtgaaaaatcaatcacgtgataatacttttgccatgccgtgttccaatcttggtccttaatgtatgaagttgtaattttggcatcccctacatctaggccatagctcttcaattcctttaacttatcttggaatttttttactaatgcgtctttatctgcttcttcatcaaaataagcatagaaatatgtatccttaggtaagtctttaatgtcatccatttcaactacagtagaatcatgcaaccagcctgcttgctcaaagtcgctacgctttcttgattcaatacccaatgcattcagattatctaaagcaaaaacgctcaaagcgtcttcaacttcatgactagtatcaattttaataattagtaatttcattaatattatctcctttgggattttcttggcataatgctatcatgataacaggtgataaatatgtcaaagaagaaaaataaaaagaacaaactcgaaaaaacattggtcgaaaaaatcttagaccaaaataaaatcaagtatcgtcaagctcaatttgctgtctccgaagataaaggcggagttgcacaaatgaacacttctattttagaagacaaagagcgtttagtctataaaactctcgtctgcgaaggaaataaaactggtccattggttggtgtcgtaccagttactgaacatttaagcatgaaaaaattagctaaagtttctggtaacaaaaaatgtgaaatgcttcccttaaagaaattagccaaaacaactggttatgtacatggcgctaatactcctatcggaatttattttaaggaaaagtttcctatctatttggatgactctatgcaaggaaatcctgaaattggtgtttctagtggtgaagttggccgcagtgtctttttgaacccagaagacttagccaaattctgccatgctccttttattgatctaaaagaataaaaagcgcttacaatttattgcgttattcttcttcttttgtgttatagtaaatatatgtaccgcatacagaatataacaattacatagaagaagatgacaaaaatgaatatattgttaggaattattggctttgtagttaccatgatcgctgcctttgttgttacggcattagcaattgccaagtaaataaagcgaaaaaataataacagatttaaaatgacgtggtttgatatcatgccattttttattttctatataatagttatttattatcaaattataaatatttaatatataaggctaaactatttatactaaaaagaaagtttttgagactgtaaaatattttgtgtaaggatgaataattccttaaatttatttctttaaacattagaaaaaggagttcctttctcgtatgattggtttgaacaaaaaaacacatacagaaagaagaactccttcatgaatgattttacaaaaaatatagcacaagctctattcaatcaagacaaaataaacgatttattgcgcaaagagctacaacaggctgttaataacttgctagaagctgaattgactgcctttctgggctatgatccctatgccagaaatggctggaatactggcaattctagaaatggtgcttatttccgcaaggttgatacccagtttggaccaattgaagtgcaagtgcctcgagatcgcaacggccagtttcatcagcacacgctgcctgactacaagcagcactctgatgttttggaaagcacgattatcaagctctactccaaaggcgtaactaccagagaaatcgctgacttgattgagaaaatgtatggcagtcattatagtccagcccaagtatcaaatatttccaagcagatgctccccaaggttgaggcttatcacaagcgcaagctaagcgacaagtttttctgtgtctatttggatgcgacataccttcctttgcgccgagaaacgtttgagcgtgaagcagtctatattgccattggcattaaacctaatggacataaagaagtcattgactactgcattgcgcctagtgagaacattgaagtctggacagagatgcttcaaaacatgaagtccagaggcttgaagcaagttgagctctttctttctgatggtgttgttggcatgaaagcggccttgaccaggacttatcctaaagctcattttcaacgctgcttggttcatgtcatgcgcaatatctgtgctaaagtccgggtggatgaccgcgaaaagatcatgaacgaattcaagcagatacatcaacagacaagccaaaaagaagctgcagctgtcttgcatgaattttatgcaaaatggaataaagcttatagccatgttatcaaaggtttgagggaaattgagcccgatctgctggtcttctacaattatcccaaacaaatcagagcttcaatttattcaaccaacatgattgaatcctttaacaacgtcatcaagcgtaaagctaagcctaaggcagaatttccaactgaacagtcgcttgatgtatttattggcatccaggcaatgagctacaatgaccgctatttcaaccgaattcataaaggctttggtcaggttcaggataccttagaatcctattttgattaaataaatgattaaaaaatcaatttacgagaaagaactatttacacaaaagatttgacagtttcaagtttttgcctataaaaaagtcaaatttatatcagcaatgttatttatttgtgctaatctaatatgttgtcaaatgtaaaaagaacacattgataataaattgtaaaagactcagtcttttacgttcccaaaagaaggtttagataaattaaacacaaaaatgatttgagcttcaatacaaaatttaatggaaaacaaaaatttggttttagaaagttgtctgttggtttagctgcagttgcacttagcactacttttttcttaagtaatagtcaacttgttcatgcggatactaatactgcgactaatgaagaacaaactcaacaagattcacaaaaatctaatcaagaacagtcaaataataccatccagtcaactcaagctgatccaagtaaccaaaataatcaaagttcagctaaagattcaccaaaccaagaaaaaacaaaacaacaaacagtcgaaattaccgcttttcatacagatgaaaaaggtaacaacgcttccgaaataaaaaaagatgaatcagcttctttaatggctggtcaaggattgcttaaagagaccaaaacattctcatggaacggccaaattaaaggtagttctgacagtgaaactgaacaaactaaaactattagctacgtaattaaccatatctacgctaacggaagtcaaaaatctaacactccatttgcatctgatgaagtcatgctcaaacttaaatctgaagattcgggccaaagctggactcaatattctattgataatggcaaaacttggaacgctttagcccaagcatatactgtcacagtttctcctaataaaaacgctaatgcaaaatatgtagcagacttagttaatattgttactcctgataaaattagactcaataatcaacaccaattcattattgcttcatcaactccagacggtactcactatgaattaactattccctactacataactcaacatgcagatgtcagattttatgatgacactgataaaaccgatcaagcaatcaataaactacttaacgataatgggtttcaactctcaatgactagtgatgaagctggtcaagggcttagtgctgattaccaaaataaagacgaccaatcagctaatacccctattcaatttagcagggtagaagaagcattagctttatttaaaaataagcactataaaattgaaaaagtttctggcgccaatgccacattaaaaacggacagcagtatcggctttggcaactttgataataatgaaaatgtagatcaacacttcatcatttacttagttcatgaaacgcagatagaaaagcaaactgctacagttagggaagaagtaaaaggctactatgtaaacggtcttaagagccaaaacttttccggtataaataatccagatgtggctgttcctaaaaatgatgaaacacctactccaaatgtagtaaaagaagttatttactctagaagcagggttgttgatttagttaaggatccgcaaggcacagaaacaaactggtcacaatgaatatcaaacaatcaagcattttcagctattccgtataacaatactacaattaaagacataattgatggccattatcatttagataaaaatggcgtggttcacattgcttcttcacagaataaacgtactgctacaagcaattcaattactgggatttccgcaattgcacctaattcggagtttttagcttcaattgcttctaccacagttaatggtcaaaaaacaacaactggcaatctagcaactattagcatttgggtaccctatagttactccgcttctaaaccggaaccaaccccaactcctattcctacacctgaatctgagactccgactactccagaacaaccgaagcagccttctgagccaaataagtctgaaccacctaagtctaatgaatacaaacagacaaagattcacaaaaaagtaaattggaattctagcagtcatccttatggcactgatatgcaaagacagaagcaacacaaagatggaattattccaccccatggaactgccattaataatattccaaattcaacaacaaagactagaactactaataatatcgttaagtcttacaataatattagttctaaattaccacaaactagtcaaaataattctaacctgagcttaatcggtctagctttagcagcactaggactactgggatttactattacaaaaagaaagcatgattaattaacaatagcaaactaaaagagacagacaaaaaatccgtctcttttttctaccttaatttatttaatctgcatgtctccacttcttatcagttaagatacgtgcagctaaaagacctaatagcaaggccacgacaatcatcaacgcttctacgatccaataagctccgatattaatattcgtgattccaaagttaaatacagctcgatacatgtaaagaccaggcaccataattacaattgatggaacagtaattgcaattcttggaaaaccaacttttttccttacaatacttgctaatagaccagctgttaaagcaccaataaatgctgccaaagctggagcaacctgagcataatcgaccaagctaagacgtaatgtatttgccattgctcccattaccgcggatgtagctgccatttgtggtcgactgttaaacataattgaaaaaccaaacaccccacaaaagctagccagcaatcgcaagcaggttaaagtccctggatcaatttttaacttaggcatagatcctggatgcaaacgcaaaattgttgctacagcccagcctgccatcgttgcaattacgataattaaaatcgcataagtcagccgttcaagcccagagcgcatatctaacttagacatgtccaatccagatgtaataaatggaaaacccggaattacgaacaacatggcaccaatatagccataggcatgatcatgattaatgtggaataatatttctcctacatgaaaactcataaagtaaacactgcaggctatggcaaccgcaaccgcaatcttggctaccaaagttaacctgtgcttacccataattgctctaatatattgaccgcaagctgcacccaagaaagcacagatcacctcaggaagaccgccgcctaataagaaaataaagccgccgcaggccaagcctgaactaagtcccgaaattaacggagaatacgctgacttttgctgagaaatctcccgtaagcgtttatgaatttgaccgatagtccattccccatgtcccttttcaaattgccgaacgaatttttccatttcattcaacttagtcatattcacacctgttgctggtaacgataaagtctgggaatatgattcattatcaacatcaaaacaggtatattcaattgacactaatccaatatccgttgaacaggtaatgcccaaggttctggcaaccgtatccattgaatcacgtactcgccaagcacctgtaccacagcttaaaagcataatacctactcgacctacaatcgaggtcttttcaactaatgttgcatcctgcgccatcgtattattatcgctcttgaaaaattcctcccacagaatcttcatatgatgtttttctgataaatgatgttctcgatcaatttcactcatgctattattactttccctcacatagttcgcataattataaccattatattctaccacaggaacttcatcataatttttgatattttaaaatttgctgctcctttttattattttaaatttataatagacatataagttattttgaaataaaggatgatttaaagtggctcaattaactgatgaacaacttgctaacattgctcatgacttttaccttagtcagcttaatattgctgatatctcacaaaaatatgatttatcgcgatatttaatcgctaaagcactagaagacgcgcgtaaccgtggaattgttaaaattaaaatctcgcgtggaatcaaacgcaatcaggtactagagagagaatttcagaaaagattcagattaaaagaagcttttattgtcgaaactaccggcaaccgcgatgaaaatagtgaagccgtagttaacttcgctgctaaacaaattgaaacctatctaaagcaagcaaaaatcgctggtattagttggggtgcaacaatgcatggcgtgatcaacgacttttttgagcaggacttagagcaactttactttattcaattacttggtcaaccaattaattctaaccgcaggaagaatccattggcccaagatgcagcagaaaaattgcattcccatagtctaagtctgccaaccccactttatatactaaatccaaagatcatgcctgccttgaaacatgagccttattttaaagtaattgaaaattgttatcatcacttagacatgcttttcactggtcttagtactttccaatcatttcaagctaatcaatttttgaaagaaaattatggacctgaactatttaaagacattcctgactgcgatgtagctggaatgatcatgggacgaccatataatattaaaggtgaatttttccctgacttcgaacaacacatttgtggtatcagcatgaatgacattatgaaaacgccaattcgtttttgtgtcgtccgcaatcgctttaaatctgaggcactccttggcgccttacgtagcggtatcattactcatctagtaactaatgatgcaattgcccaacgcgttttgcaaaatatcgattaattcgctaaagtaatacagagatagactatttataatgaggagaaaaaatgaaaaaatctaaatatgatttatggattggtgcactgaacctgatcaattgtgtgttattcattagctcttggtttgccatccttggagctgacttcactgctagaatagctttaatattttacttatttgcctggttcggcgtgatccttaatgccgttgcagtagtgcaatcgcataacatgaatatctcaccaattgggccaattttaggagtaattggtaatgcactatatggctttaccgctgctctagccttacctgctgtgattgttaatattatttctgccttctttatctttatgcaacatagcaataaaaaatagaaaaagcagccaaaaattggctgctttttctatgctaaaatttgttatgtactggttaacaattactaaagttggatttacaatgactgggaggtgagcattatggagtttagaattgatgaatgtattccagatgttgtatcaatgatggctttagcacaagcaattgcaaattttgacctcaatggtaaaaagccacaagatgtgaacctaggaaggatggcaaatgtctaaagtttttcgaaatgacttaaaaataaaggacatccctaatcaaagaaaacttagggatgtctttttttagcctaaatatgaaattgctacttgtaattgtgccagcttcattgccgcctgagccacattcttgcgatcaacatcaacaaaaatttcacagtgtttttcatcaaattcataacctgaccctagcgcaatatcttccgcagtttcatataactctttatcttcctcattaggatctagcttaaatagaattcgtccgccatcactaacgcggcaatgatcatcggcttcctcaacccaaacatatacggtatcgccataagaatcaatcatcattgtggcaatctgcaatgtcctatcgtcaacccaaattgtcttggttaccttagcaacatacgaacctatttcatggttaattttctttaattcatcctgcttcattttttacctctaatttataaattcttttctttaatataaggataccctcttagcaattcttctacaaatttattaaatagattggatctcccaatcagcttgactgttaccgcttactaattataccttgtaaatatactaaattttggagaaaaatatgcatactaagggtttatcagttaaaaatgttgtagcgatcggaattggatcggcaatctatgttattttagcacgtttcacatcgattcctacgcctattcctaacacaaatattgaattagtctttccttttttggctctttttgcgtcaatctatggcgctaaggtcggttttattgtcggctttattggacatgctttgtccgatttcattatgtacgggcagacttggtggagctgggtattagctactgctgttttaggctggatcatcggtttagcggccaaacgcttagacttaaaaaatggtatttttggtattaaacaaataatcttttttaatatcattcaaattattgccaatattctcgcctggattgtagttgcaccaatcggtgacattatcatctatagcgaacctgctaacaaagtttttgtccaaggaatttcggctacgctttctaatggtattacaattatggtcattggcacgctcctacttaaagcttatgctggaaccaagattaaaaaaggcagcttgcgcaaggaggattaaacaatgcctaaaacaattattgaattcaaagatttttcatttaagtatgacagtcaggccgagccaacactaaaacagattaatctaactatcaaacaaggtgaaaaattgttaattgctggaccatcaggttcaggtaaatcgaccattggccgctgtattaacggcctaattcctaatctagatactggtgagatcaccggtgaatgcactattaacggcaataatattaaagacactaacctatttgatctttctttcaccacctcaactatcctacaagatactgacagtcaatttatcggcttaactgttggtgaagacattgcttttgctttggaaaacgactgccaaccacaaaattatatgaaacaagttgttcatcgctgggctgatgaattagggattgagcatttattaaagcaggcgccacaaaatctatctggtggtcaaaaacaaattgttgctctagctggtgtcatggttgatgaatcaccaattttactttttgacgagccacttgctaatttagccccagcttcaggaatgaaaacgatggctttaattgatcgcattcaaaaagaattaaatgctacagtaatcattattgaacaccgtctagaagaagtttggagtcagcctatagatcgcattatcctaattaatgatggtgaaattgtagctgataagaagccaaatgatctattacatgagaattgtttagaagacgttggtgttcgtagtcctctttatttaaatgccttaaaaaaagctaacgtcgaccttacgcgtattcccgacctaacttcagtcgctgctttgccccaagatcctgaaattgctaagcagttgcaagaatggcaaaacaacattaccctaagtggtgaaaaagaagagactcatcctctattagaactcaaaggcgtcggccaccgttatagtaaattgcagattcatcctttacatgacgttacagcgacaatcaatcaaggcgattttgtttcaatagttggtcaaaatggtgcgggaaaaaccaccctttgtcgaattatttgtggctttatcgacaatgagggacttattttatttgatggtgataaccttaagcagttttcaatcaaagagcgttccgataagattggttatgtcatgcaagatcctaaccagatgatttcccaaaaaatgatttttgacgaagtagctctaggcttgcgtctacgtggttatgatgagcagactattcgcactaaggtctatgatactttgaaagtttgtggtctttatccgtaccgcaactggccaatctctgctttatccttcggtcagaaaaagcgagtcacaattgctgcaattttagtgcttaatcctgagttattaattcttgatgaaccaactgcagggcaagattggcaaacttatactgagatcatgaactttttaaaacagcttaatgatcaaggcaaaacaattatgattatcactcacgatatgtacttgctgatggaatacactaacagatccctggcttttgctgatggaacactaattgctgacacagatccaatcaagttattaactgaaaaagctttaattaaaaaggctgctttgaagcgaacctccttatataatctcgctatcaaatatcaattagaaaatccagatagctttgtccgcgcctatattgatgcagaaagggatgaaaaacatgcataatgaaagccaagttttaggttatcaacctggtgattcttttatttatcaattaaacgcaaccactaagttagtttttatgctcctagtctcggttgcttgtatggtaacttatgataccagattcttaattgctatctgtattttatcaattttcttgtttaaagaggcaaaaattaagtggagtcagatttcttttatcgtgaaatttattgtagttttcatgttgctaaatctgatttttgttttcatctttcagccaagctatggtgaaaatatttatcattctaaaagcatcttgatccatgccggctacttcacattaacattgcaagaggtattctacttattcaatcttttcttaaaatatgtctgctcaattccaatcgtattgctgtttctattaactactaatcctagtcaatttgctgcttcattaaataaaatcggcattagttacaaaatttcctatgctgtttctctagctctacgctacatcccagatatccaaaattcttattgggatatctcagctgcccaacaagcacgtggcaatgaactatccaaaaaggctagtttaggcaaacgaattaaggggacattgaatatcgtgatgcctcttatcttctccagtttggatcgaatcgatacaatttcaacagccatgcaattacgccgctttggctcaaagaaaaaacggacctggtatgtcacccaatcatttaaaaaagctgattatcttgtaatgatcgcagccgtgattttggtattaattgtggttggtctctggcaacttgatcatggtagattttataatccatttatttagaccaaaattaaaaggacctaatggtccctttttggttttcgatttttctgtttatgatcatcttgagtgacaatctcaggtttcttaggaatcggcggcgtgattatttcataattatgcaaacggtgttcaagatagtcatctaatcgctcttgcgtattttcatgtacaataatcattaaatcgcctcacttttcataattatacctcaaaaatgtaggttaaacagcgtaattactaagtatgtcattccactagcaatcacaggacctgcagctacacccttgaaaaccactactccaataatagtacctaaaactaatgcaaccgtcacctgtggcaccgctgctaattgatcaacaccataacgtgacaagatagctacagcaattcccgctaaaatggcaatccatccagctggcgacttaaaagttttaatcagatccttaaagccaatctgtcctgtcgcaataggaactagaattgcaaccgaaataatagttacgccccaattaatcccctttgcttgaatagtaggcagccatttactagtaaacggtaataatttaaacaccattaccactcccgttgcaataattaatgacatgtttttacccaataacgctacaactagcaccaatgctagaaataaccaactttccatatttatctcccctcaaaaaatcattagcattagttcactttaacaaaaatattcatcaaaacaaaataatgagtctaaataagtgaaaatcaatctaatttgtgtcataataaaattactcagaaaaatatatgtatacgcgcacctcgttcttaaaacgaggtgtttttttacgcaaagaaccaatgcagatatttcacctacactggttcttcttagttgaccgatattgcgatgtgactttactactgcatcgtagttagaatttgcaaatatttatgcttgaaaataaaatatttgcacaaataattaaaaaacgtttcttgcaaaaatacaacttaacattttaataaaaacaaaaagatgccactttcgtgacacctttgtgattacttattcatacatttcgttttgaactaatccctaacttccttaatggtatcaatgatagtaccatcacgatactcaactaaggcaaccgtacgatcagtatattcaagtggctttggtacaccaacttgtttttcagccattttttgcaattcattaatatccaagatcttaagtcctggcaccttactaaaggcatccactaaatcctggcgagctggattaatggcaattcctctttcagttactaaaacatcaattgatgaacctggagtaacaatagtttctactcttggaacaacagtcgcattacgtccccgaacaagaggagctgtaataatcgtcatcttggcaccagctgcggaatcttggtgaccaccgacggctccacgaatgacaccatctgagccagtcataacattaacattgaagtcagtatcgatttgtaaagctgacaagattgaaacatccaagttgttaaccactgcacccttattatgaggatcagcataccaagaagcatcaatttcttgttgatttttattgttagccattgattgggcagcacccttatcaaagtcctgcacatccataacttttctgactagaccttcttcaagtaagtcagtggtaggtttagtaataccacccaaagcaaatgatgcagtaatgccatcatcaatcatactttgacgtaagtacctggtgacagctaatgcagcaccaccagaaccagtttggaagctaaacccttgcttgtaatatggagagttaatgattacctggttaaccatttgagcaatcttgagttccttaggatccttgggaaagcgagtggcaccagaaccaatcttgtctggatctccgactttatcaattttaaccacataatccacttgatcttgctgaattgacgcaggcgtatttggataatcaacaatattatcagttaataaaacaaccttattagcatagcgagcatccattagggcatagcccaatgagccgaagacagcatccccatcttgaccgttagcattacctgcgggatcagatactggcacacccaagaaggcaacatcaaccttaatctcgccttcttcaattgaacgagcacgattaccatgtgagcggaaaattacaggattcttcaagccgccatgtgaaacaaaatcacctagtgaaccgcgcatacccgaagaagtaatattagtgattactccctttttaatcgctccgataactttatcattcataacaccagtaagtgaacttggagccaaggttaaatcctggtaacccatactaataatcttgtccattaccaagttaaaaacataatccccatttctaaaatggtggtggaatgaaatagtcataccatctttcaggttattcttgattacctcatcaagtgaatcaataatcttattttgtccagtagtaactcttacctttggagcaacccgcttaacttcaggatgaccaatttcagtagtttcaaatggtttcaaattcatttttttcattaaatcatctggtaattcgcgttttactttattctccaatgtagttaccttctttatcaatcaagttagaagctttcgctgtttccaaaaccctggtagccttttctacaactggcttatcgatcatcttaccattaagtgaaataacgcctgagcccttagctttggcttcacgaatggcattttcaacattcttagcttgctcaatctcttctttagttggattaaagaccttattaaccatttgaatttgacgtgggttaaccaaactcttgccatcataccctagttcatggatatagttagtttcacgatagaagccttcagtatccttcatatttgagaacactgtatcaaaggcatatacgtctgcggcccgagctgcttgtaaaaccatgttacgcgcaaattccaattcgcgaccatctggataacgatgagtatgcatatctgcagtatagtcttcgccagataccgccaagcccatcattaaaggcgttgcggttgcaatttttggggcatttaagacacccttggctgattcgatggcagccatcacgccaatagaaccattttcaatgtcaaattcatcttcccaatgttcgatatcctttaccaatttttgaatcattgcagctgattcagttttaggcaagcgaataacgtcaacgccggcttttaccattgccttaacatcttcatcgtaaaatggcgtgtcttgaccattaacacgaactacaatttcactgccaccgaaatcgactgtcttaattgcctcatagaccaacattctggcagcatctttttccgttaatgaaactgagtcttccaaatcaagcataatcgaatctgcaccataaatgccagcatccttaatcatagctggattattaccaggtacaaacatcatggttctacgcaaacgattcttaacgtatgtcatttagagcacctccaaatctggcttgtctgaagtttcggttgcacgttgtgcagctgctaaagtacgagccttaattacacaatccagtgctcccttatcggttgctttaaccttggcattttctaagccataagcttttaaggtgtcagtaatcaccttttcaatctgatctccataggccttttttacttctgattcaaggtcaatctcaatgccgttagaaccctttgaaatcatgatttggatatctgaactctcaagtgttcccgcaactgctgtggttttaatttccattaatattcattcctttctcaattttagactgcaatttctgcatgttttgcttaataaattcataagtcgtttccggcacgaatttattgatctcttttaaattgccatccttgatcagctgtctaactttagtggcagtaacaatttgaccgtctttttccaagcgatcaattacgattacttcaatctcaggaccaagctcatgcgctaggctaacattataaaagtgagtcgttcttgaaattggttctttaccaatataacgacgggtaatgttcagtcctggtgcaatttgattcttaaagacagctgcgtctatcaccgtttgtacagcaattaaatcgtcaggtgattttaagaagtatgctggaaaagtagctggtgaaaccatgtagtctccgccagagattactttcacattactaaactccttagtaccttcttgcaccaatttgaagcgctcatcaaagctaaacaaagaaacatcattagccacaacaaagacataaaccaaatcgttttcttcactagccatcttaatcaaatgctgatgacccaaggtaaacggatttgcattcatgactattgcagcgaccttcttatgctcttgatctgctatttcgggcacttcagccacaaattccttcacatcaggcgttccattttctaaaaaggctgcctgatccgtcttggctaacaaattgaagtgcaagtgctcaaagctagttgcatactttgctttagtaaagacaaaggaatggaaaattccatcattagtcaaatattgcgttaaggctgtaaccactttattaaagcgagccccctgcgtatcggcatcattcttgactccgatatactttaagacattaccagccacactaccagtaccaactaaattgccttcctcatcttctagcccaatagtatgatcaatcacgttaacttcgcgttcactaaaatcatttaaccccaatgattccaacaagttttcccatttttgcctagttgtagcgtcgtttaaaaacaaatcaacgactttatccataaatatgccaccttgctatttcggtaatcgttttcacaaatatagtttactctcttggtttgattatttcaatttatctattaattttttaaatttttcaaaaattcagcaataatctcatgcgttttttctggttgctcagcctgaggcaaatgcccacattccggtacaatcgccgtttgaacatcttgattcagcatttttatcgcttgggtaaattctggattaaaaaatggcgattttcccccagcaattaccagcatgggaaccggcgtatccaaaatcatgtcacgccaatcttgctccgcatgttcaactaaacagttatagttttcggctggatcatatgggaattcttgatattcctttttagcagccaaaaacattttttcatcaatgtgatggtaaaaagccttgccaaaatcaaatttaagcatgtcaggataattatcccaagttaggtctttaaagccatacttccagctcttatccgcaatcatctttggtgactggtctaaatcaaccattgcctttagtctacctttgccataaattgacaaatatgcccaaatattggcggcccccatagaatttccaatagctactacatcatgcaaattgagcttaactaatagctcctctaagtcaactgcatgacgactaatccgctgtccacgataggttcgttcggactgtccttgattgcgtggatcaagcataataaaacgataatcatttttaaataaggcaattaaatcttgccacatttgacaagatccccctatacctgggatcccaatcaaagcaggcttatcttcatcccccgtatcggtataatgcaaaattacatcgtcattagttttaaatttcatctttaatcttttttcattttgattactcaattctattatgacgcaaaaaaagcaacctggtgattcccaatgtcattaagttaagacattgacaattaagggtgcttttttagagatcgaatcatttggattcgatctctttttttgtataaaataaaggcgaaaagaccagccttttcgcctatcttatatattatatattttaaaccttcaaaattattgccagaaagatggtgttaattatgaaagcccttcataagaatattctagaacgtcttgatcaaattatcaataatactggggatcatattcacgattttattaataatcctcatgcttttaccaggaaacgcactttagatgcagcgacagtccttaaaactacaattaacatgcaaggtcagaatttaaacagtgaactctttagagcttttggcgaagatgcaactaaaaagaacgataaagtagttagtacttctgcctatgttcaacgcaaaagccagctttctcctgcttgttttaaacatattctgactgtttttaatcaaaatctatttaatattcaactttttgatcatcactaccgtttgtttgccattgatggctctgactttaatcaaatctggaatccgaaatcgaataacattgtacaagcttcttctcataaaaagaaaccctattgtcaaattcacgttaatgccttatatgatctattgaataatacctaccaggattgtatttttcagcctaaatcagaaatggatgaacgcaaagcggctgttcaaatgcttaaagctttgaattgtggtccatatattgtaacaatggatcgtggctacactagtttcaatatgattgaaaactgcaatcgcctgcctaactgtcattacataatacgaactaaggctggacaaggcggagttaaagaaataacgacattgcctgatcaagaatgtgatcgtgagatttcctgcctggtaactacttctaactattactacatcacgcataaagccagtgagaatattcaccatgtccagcatcattatcgccaatatattaagtatcgctctaaaaatacccaggatctaagctgggattttggcgagttatgcacaataaaatttcgagcctgcaaatttagaattaatgatgccaaatcaggcaaagaagaatgggaagttgtgctaaccaatcttgatcgaaaaaattatccgctaaaaagaattaaagagctttatcatctgcgttggggtattgagacctccttcaagaaattgaagtattctttaggcagtgtacagttccattccaaacaagataaatttattgaaatggaaatttatgcccatatgattatgtttaatgcaatcagtcaaattgatgcacaggcctatattccgcaaaagcattgcaagtatcaatatgccatcaatttcaagcaatcatgcttgattattcagagcatgtatttggcttcttctttaacgcaagattttgaacggatccttattcagatcagctattataccattccaattagaccaggccgcaaggacaagagaaatattaagcccaaatcagctgtatattatttatatcgcgtagcttaaaaaagcagaatctgtgctatgccttatttgttgtacgaaaaaagcaccaatttaaccaattaaatgttaaatcagtgctttaaaagtctaatattaattgtcaatgtcttaacttaatgacattgggtgattccagattgcttttttttaccataaaccaataatcttcatccaaagaactccgacagttccaaaaataatcatatagattaatccaaggacaaaattcatcttccaccattcaccttgtttaacatagccagtagtagccaaaattgtggcaggaccattagcatagtgagtggttgatgcgttgattgcaccagtaaaggctaaaagcattgcggaaaggcctaaaggagcaccagttgcaaccgcaacagacaagaatggcaaataaagagcagtcatatgtgcagttccacttgcaaagaagtagtgggtgtagaacaaaagcaaaactagaattgccaatacaaagccccagctaacaccatgaagactattttgaactaatttggagaaccaatcaataaatccgtatgaaatcagcttaccagccatgaacatcaggatagaaagccaaatcaagatattccaagcaccagtttctttcagagcatcctgcattgttaacacaccggtaatcatcaaaatagttacagccaggaaggcaacaaaagtcgcatctaattgtgggatcttaaagaaactagacaaaacccataaaacaattgaaagaatgaagactgacatcataattttttctggagttgacattggtcccatttttgctaatttttcatcagcccatttcttagcatctggagtttctttaatctcaggtgggtacatcttgtaaataacaaatggaatgattactgccaatacagcaacaggtacgattgcagtgaaaaaccaacctgcccaagacatttgatagcccttttgtgcggctaattgttgagccaccatgttaggagcagcaccggtaataaacaaagccgttgataaaatattggcatgaaaggcagtaaagtcaatgtaggcaccaatctttttacgagaagcatcatctggcttagaatcgtagccttcttttgaaacagattcaacaactggccaaacgaccccacccgtacgagctgagttcgatggaattaaggcaccgagaattaattccaatccagtaatcgcataaccaatacccaatgacttcttaccaaatttttgaatcataatataggcaatacggttacctagacctgttttactaataccatgagccataatgaaggccatagcgattaaccatgcagcagagttaccaaatgaactaagcacgccttgattaactaccataccttttgcatttgtaacgtccttcattggtgctaagccaactaaaacagttactaccaagccagctaaggttgtaccaccaattggcaaaggttttgtaatacaccctacaattgtggcaacgaaaacggcaaacatttgccatgcctgaaccgaaaggccacttgggcgccatggagtaatacaccacaatacaattccaacgatcaaaggccaaataaagcctttataattcactttttctaaagttttcataagaatcccctattctctatggacgatacacatcatcaatgatgtcaaagcctttatctgctaagcttttatctacccaacttaaatcaacttctcctttgctaaaggcaattgctttagcctcatcctgctcatgaaaagcttgtgccttaggcaaaatctcaggagcatctttacgtggaatacaaattactccatcagcatcccctaaaatcacatcacctgggttaacactaacattcccacaagcaacaggtacatttatttcaccaggtccttctttatatggtccacctggggtagtactggttgcataaatcggcagtttccaatttcttaaattatcaatatcacgaattgggccaccaattacaatacctgcaattttcttttgatcgcgtaagtaagacatcattacctcaccaatcaaagatctagtgttatcaccctcgtcgtcgatgacaatcacatcgcctggctggcaatactttaaagccgcataaattgctaagttgtcacccgccctggtgtgaaccgtaaatgctggaccaaccatttcctcatcaggattcgacattaacttaattctaggattcatagcacaatttcgttccatgcaatccgcggtattagaagctgggatctttttaaaaccagctacaacttttggatcaggcatttgcctctttaaataaattctttttcctacaggcatagagtagctctcccctctttatgctccctaatctatcttgttattgttaaacaagcctttttataaaaactaaaactcatcacaactcacaattagtattatacacttatcaacagattaagcggttacaaattttgagactgtaaaatattttgtgtaaggatgaataattccttaaatttatttctttaaacattagaaaaaggagttcctttctcgtatgattggtttgaacaaaaaaacacatacagaaagaagaactccttcatgaatgattttacaaaaaatatagcacaagctctattcaatcaagacaaaataaacgatttattgcgcaaagagctacaacaggctgttaataacttgctagaagctgaattgactgcctttctgggctatgatccctatgccagaaatggctggaatactggcaattctagaaatggtgcttatttccgcaaggttgatacccagtttggaccaattgaagtgcaagtgcctcgagatcgcaacggccagtttcatcagcacacgctgcctgactacaagcagcactctgatgttttggaaagcacgattatcaagctctactccaaaggcgtaactaccagagaaatcgctgacttgattgagaaaatgtatggcagtcattatagtccagcccaagtatcaaatatttccaagcagatgctccccaaggttgaggcttatcacaagcgcaagctaagcgacaagtttttctgtgtctatttggatgcgacataccttcctttgcgccgagaaacgtttgagcgtgaagcagtctatattgccattggcattaaacctaatggacataaagaagtcattgactactgcattgcgcctagtgagaacattgaagtctggacagagatgcttcaaaacatgaagtccagaggcttgaagcaagttgagctctttctttctgatggtgttgttggcatgaaagcggccttgaccaggacttatcctaaagctcattttcaacgctgcttggttcatgtcatgcgcaatatctgtgctaaagtccgggtggatgaccgcgaaaagatcatgaacgaattcaagcagatacatcaacagacaagccaaaaagaagctgcagctgtcttgcatgaattttatgcaaaatggaataaagcttatagccatgttatcaaaggtttgagggaaattgagcccgatctgctggtcttctacaattatcccaaacaaatcagagcttcaatttattcaaccaacatgattgaatcctttaacaacgtcatcaagcgtaaagctaagcctaaggcagaatttccaactgaacagtcgcttgatgtatttattggcatccaggcaatgagctacaatgaccgctatttcaaccgaattcataaaggctttggtcaggttcaggataccttagaatcctattttgattaaataaatgattaaaaaatcaatttacgagaaagaactatttacacaaaagatttgacagtttccaaattttgaattattttgattttttacttattttttgaattatttaaactcaaataattatgcaaaaaaagtgtctgggaaaaaactaattctcagacaggaaaaaagaacgatgatttcctaatggatttcatcgttctttttctatactttaagtgccttccttgatattattgaatcaccacaaaacaaaaagaaagaaggcaatcttaatgtatcaaaattataccataggtcaaacagctttaacactcaacttagacttcgctattcctcataatcatttggctaataccattagctggtttgtcgattcaattccagaagatgtcttattgggtaatactgctaaaaccggtcgtccagcttatcatccagcgatgatgcttaaaatcttgctttttgcttattccagaagagtattttcaggcagaaaaatcgaattaatgctggaagaaaacgtgccgatgatggctttggctgaacaccaacagatttcttaccatactatcaataactttagatccagcaagcatgccaatgagctggttaagaaaagcttcctctactttaccaatttgttagaagccgagggccttatcaatgaaggagcgatctttattgatggcactaaaatcgaagctgacgccaatcgctatacttttgtttggcgcaaggcagttgaaaaatttcatgacaagctcaaaggtcaagcggttgagctttatgatgaattgattgccaaagaagtcgtcaaagcaatggcaaaagagaaagtccagaccagtcaaggtttggcagagctagcacaagaaacggaagccgagattgaaaagctgaccgaagaaattgagcaagaacccaaagcaatccctggcggttcgcctagaaaagcaagaagacgcggtcttaaaaagctgcttcataaactaagaaaagactatgttcctcgaatgaagaaatatgaagaggcgaaagaaatctttgcagggcgtaacagctattctaagacagatcatgacgcgactttcatgcatatgaaggaagatcacatgaagaacggccagctcaagccaggctacaatattcaagctgccaccactgatcaatatgtggttgactttgctttataccctaatccaactgatttcagaactttcgaaccatttttaaagcagatgacgacactagacaagtttgacaagattgtcgctgatgctggttatggcagcgaatataattattcaatgttagaagaagagtattcagacaagaagtactatattccttataccatgtacgaaaaggaaaagaccagaaagcatcgcaacgatccgactaagctggctaactggttctatgatgaaaaagatgattattaccttgatcaaaatggcgtcagattcaacttcaaatattatagtcaacgtaaagatcgatcgactggtcaggttcgtgattttaaggtctatgaagcagatgaatttcaactaacgccagaattagaacgcttagccaagactaagagcggacgccaacgtcaggttcgctataatcctaactggcaatacctaaaagaaaaagccaaagcagttctccaaagtcctgaaggcagacacatctacagcatgaggaaatatgatgtggagccgatttttggacatttgaagaacgtctttggcatgcgccgaactcatttaagaggcaaaaagaaggttgaaacagatataggaatagccttcatgatgatgaatttaagcaaatattggaacagaagatggtcaaaagaccaattttctttgttcaaaaataaaaatagacagaaaaagacggtcaagcaactcaaattaagagttggattgatcgtctttcagtatctaagggttagttttttcccagacactttacttgatctttgttattttgatcttattcaccaaagttttcccaaggcattacgtcaacagccggttgatcaactaactcttgcaattcctttggcaaaaattccttcttcacaatcacatcgtaaacatattgttcaaaccaagcttgactcatttcgtagaagcccttgtgaccaaacttgtcgccccatgagttttcaaccttccacttacggatatgaccgttgtcttcatcaacaccgactaaagtcatatcgtgagtagcaaagccctcaccagtattcaaacgatcagccttgctcatttgcgtatcaacgtcaaataattggtcagtcttgtacaattcagtatccaaaaagccagtttttctttccatttgcttcaagacatcgttaccaaagctaactgcttcacctgacttaagttgagctactgcagcttgagctaagtattcaattggcacattcaagtatttgacttgatcgccgccagccacattgtcataaagtggcaagtggtaaaccttgttatattcatggttaggaatgttggacaaagcaacataatcatcgaagttgaagtccttaaagtatttttgaacaaatgcttgtggagtcaaatcacgctccaaatggtacttcttatcatcatcacggtattccaaatcaaatttctttggtggttcacccaaggcaactgataccatgcgataaatttcgttcaagaattccttcttggtcttttctgcttcatccctcttgccttcattaactaatttacgcaaaacaagagcgtcttttctctccttacgagctaagttttcggctaaagcagtagtattattagtattaaagctttctggcattgcatatgaaggtaccacgccatactttttaactaaattaatggccatggtccaaaggccaccatcttcaccggcaaactcaagccatgcttgaacatgacgatcagttaaaggtttatctgccaaacgaataattgcattgtaaaaagcgttagcacgttcaatcttgtcccagaagaaattataagcttgtgagaacgtaaaatccttgaccttgttttccttgccaaagtagtggcgcaaaacattcaaagtagtgaattcccagcaacgaccagaatgcttctgatcagttacaccgccaatatcaagttcagttgaaaagacatggttaagtcgttctgatacgcggtcattaaatgaagcttcaagcaaaccactacgacgagcagcacgagaagctactttattctcaggattagaattaaagctttcagaaaagccttcaatttcttgttgtgaaataactgtcatgatatacctcgttaattcttatcttttaattttttattaatcttttcttatataatactattttctagcttttttgtcattaagaaaaagtcctagtttttgacaactagggcttttaataaaattaatgatcaattaaaggtttatacctgacaaaacttcttgcatcttgtctgctgagttaatcatcttagcatgctcagtatcggaaagcttagtttcaattaccttttcgatcccttcaccgttaataacggttggggtacctaagtaaagatcatgcttaataccgtattcaccattaatcggagctgaaagtggcaaacaaattgcacgattgtccaaaatagctgagacaatttgagtaagcatcattgcaacaccgtagaatgtagcacctttgttggcaatgatcttgccacctttcttacgcacatcggtctcaatttctgctagaacatcatcgttgatttctgagtaatcacggagtgccttaccagcaactgttgattcatcaaagttttcaaaactagtatcaccgtgttcaccaagaaccattgagttaaccttagcaactgggacattcaaacgctttgaaagttcaacacgaagacgcattgaatcaagtgaagtaccagtaccaattacacggttcttagggaaaccagacaacttttgggtcaaagtcgtcaaaatgtcaactgggtttgcggaaacaacaaagacaccattaaatcctgattcaactactggcttaacaatactttccaaaatcttaacgttcttgttaaccaagtcaagtctagtttcacctggcttacgaggaacaccagcagtgatcacacaaacgtcagcatctttagcatcactataatcggctgcaggatgaatattggtttgacccataaatggcgtaatatcttcaaggtccattgaatcaccaacaggacgatccttagctacatcaaaaattgctaattcatcaacaattgtattttgcaataagtcatttgcaaaagttgaaccaacagcaccatcaccaacaagaaatacttttctactcataagttaaattagtcctttcaaatgtttataaactgttttttatctacatgattaattatacactaagcgctttcattagacacgatttattccataattataaattataatatcccatcaaaatctcgccagtgttattatttctatcgaaaaagagcagttaaccaaccgctctctttacataatctttcttatattatttactttcacgaacatatttagccatctgaatacctgcttgacgaccaaaaataactgtttcggcaattgagttaccaccaattcgattatttccatgaagtccgccagatacttcaccagctgcaaataatccatcaattacattaccattagtatcaagtacttgagtttcagtattaatatgaataccacccatagtatagtgaattgctggatgaacatgaattgcaaagtatggaccacgatccagttcacgatccatcccagtcgttctgccaaattctttatccttaccagttgcaacggacttattccaagcggcaatggtcttttctaagttggcaccatttacgccaatttttttagctaaatcagccaaatcagtaccatgttctactaaaccaatctggtcataaaactcaactgcagcaaaatgagcccgtacacctgagtcaaaaatcaagtatgccccatcttcatgcaaattagtaattgcactagaaacaatctttcgtgtacttaattcattaacaaaacgttgaccattcttgttaactaagatagcaccttcaccgcgcagaccttcaccaattaaataaacatgcggattatcagtatctgcagttgggtgaacctgaatgaagttcatttgcattagttgagcatcaagtgcttcagcaagcttcagtccatcgcctgtagcccctggctgattagtagtcttatagtcaactaagtctggacgatacttcttaatgatatccttggaagcaccaaagccaccagtagctaaaagaaccaccttagctttaactgttttaatgccatctggtgtctcaacttcaacaccattaacgcgcttcttagcatcttgcaacaacttggtaactttagcaccagtaaagatgtcaatacccgcttttttcacctgtgttgtcattcgtgaagttagataaaatccaactggttccattgaagcaggacggtgagcacgtttcttactcatccctcctgtaatggtcaaatcagttaaacgaataccatatttcatcaaccatgaaatagctaaagcagagtggttaacaaagtacttcaacatggcacggtcatttaataaacctccaccttttaaagtttcttcatagaagtcacggttattatcaatgatcccttcgtcaagctgaaccaaagattcagaagcgttcattccacttgaagcacgactagtgttaccaccagttttctcatttttttcaagcacaacaacatttagacctagttcatgagcttgaagtgcagcagtcagacctgctccgcctgagccaacaacgatagcatcatatttattctttaattcttttgtatttggcatttcttactttccctattcttctggagtagacttatcaacattagtcatttgcatatagtccatccattcatcatattgttcttcagtaactttaccactcttcaaagcagcttctcttaaagtagtgccttctttatcagcagtttgcgcaatcttagcagcagcatgatagccaatatgtggcgacaaggcagtaacggtcattaatgaattctcaagtaattcatccattctttcttcattaaccgttaagccatgaatcattttatcagcaaaaccagtaattgtaccagttaaaatatcacaactatctaagaatgatgcaatgatgactgtcttgaagacgttcatttcaaaattaccttgactagaagcaaaggtaatggtggtgtcattaccaaatactttagcagcagccattgttacagcctctgcctgagttgggttaactttacctggcataatacttgaacctggctcatttgctggaatatttaattcatggtagcccgctctcggacctgaagcaagtaaacgaatatcttgcgcaatcttaaacatatcagcagccaatgttttaagggcaccatgaactacatcaagacctgaatggtgagctaagccccagaatttattagttttaacttcaaatttatgaccatagacttctgataatttaccagcaattttttcggtcattcccggtgctgcattcaagccagtccctacagcagtcccaccaatagctaattcgtagagagttggcttcaattcacgaatatatgataagtcatgtttaagagcagaaatatagccagataattcttgaccaaaagtcaaaggcgttgcgtcttgtaagtgggttcgaccaactttaacagtcttccaatatttcttttctttaacaactaattcatcaattaagtgttgaattgctggttccaacttgtccaatgcttcaacggcaacaatattcattgcagttggataagtatcattagatgattgaccacggttaacatcatcattaggcaaaatatctaaacctgggtgcaatttattagccaagttagctacaacttcgttaacgttcatgttgctttgagtacctgaaccggtttgcaaaacatgaagtgggaagtccttacgcaagtcagtatcgcttaaagctagcaaatgatcaattgcatcttcaattgcttcgcctttttcttttggttcatcgccaacttcaacgttactttctgcagctgccttctttaagtgtaaaaatgctcgaataatttgcaatggcatcaattcaccacttgggaagttattgcggcttctttcagtttgagggccccataaagcatttttagggatcttaactggaccaatagtgtcactttcaacacggtattcttcttcgctcatattatattcctccttattaagctctataaggtttgcgttaattatcaatcaccatttataatacctgtaaaggctttctttttcaatttcattccaaaaaaagacccaggatttttcctggatcatagttttatctagactggtgattcattcttttagcaaagaagtcaccaatgatttgaacgataaaaatcaaaataattactaatacagtagctactaaagtaacatcattattgaatcggttataaccgtatgaaatagcggtattacctaaaccaccggcacctacagcaccagccattgcagtcaaaccaatcaaagaaataatcgtcaccgtcgaaacacgaatcagttctgagcgagattctcttaaataaacatcaaagacaatatcacgcgcagttgagcccaaactttctgcggcttcaaccttacctgggtcaacactttctaaagcaacttgcacctgacgagcataaaatggaaatacgcctaaagttaatggtactaaggctgccttcattccgatctgtgtacctacaattttttgagtaactggtgcaacaaaggcaagcaggataatgaacggaatcgctctgaagattgaaactagcttatctgagaaattgtaccagaatttattgggccgaatcccgccatccttagttaaaactaaaatcacgccaaagataataccaagaatgccaccaaagatagctgaccaaaaagtcataaataaggtctgaaaaatactagtgccccagccagcgtctccgccccagccaagttgaacaacattgggtaaatatttacttaagaaactaatcatgatatacattccccttttcatctaaacgtgtaaatgtcacattttgcttagccaaaaattcttgtgtttgcttttgcttagctggatcgcctttcaccaataccaccaaagtaccaattggctcttcattcaaaagttcaacattcccataaagcattgaaacttctacgccaatttgcttatacaattcaataatgattgatttagtcacattagctacgctgtaaactaattgataaattgcttcatttttgccaagcttatcaagcgccaatgaattcaaagtagaaatcgcttcaagtgatccaccaacaaacttcttggttaaatcctgcttaggatgtaagaagacatctcgcaaactgccgtcttcaatcacattgccgtgttccatgacggcgaccttagtggcaatcttcttaacagcatccatttcgtgcgtgattaagatgaccgttaagtggaactttttgttcaaacgcttaagcaggtccaagatttgttgcgtattttgtgggtccaaggcactggttgcttcatcagagatcaaaatatctggattattagccaaagctctagcaatcgctactctttgttgttgcccaccagataattcagctggataaaagtcagccttatcttttaagtcaaccagatcaagcaattccaatgaccgtttttctaattcctcatcactcaacttttcatgttttaaggcaaaggctacattttctaatacagtcgtttcatttaataggttaaaaccctggaagatcattccgatgtttctgcgctttaattgcaattctttattagaaatcacctgcttgccatctttaagaaattcagtgccatcaacggtaatactaccggcagttggtttttgtaaaagattgaccgttctaactaaagttgacttgccggcaccagagaagcctacaattccataaatgtcgcctttttcaatggaaagagaaacattattcactgctttaactcgttcgcccttcttctgagggaaggccacttctacatttttcaattcaacaatactcatttttgatcctccttacttcaacttaacgtcccaggctgcaatttgcgtattgccatagtattccttagttagcttcttagtttctgcagtttggtaagccttgacgacatcttggtaaagcttgtccttttgtttgccttgtttgacacaaagaatgttaatccattgttttgaatctttgttaattggttcaatgtaaatcgtttgcttatcagtcaagccagcaggaccagcataatcattatttactacagaagcgtcaactgaattcaatactcgaccagtttgttcagcaccgatttccttaatcttgtagttatttggattgctggtgatatcagctacagtaactaaggtcttacccttcttcaacttaattaagccggcatttttcaaaacaaacagtgctcttgattcgttagtagcatcgttaggcactgcaatcgtggcaccatcaggtaagtcactcaatttatgatacttgcgtgaataaagtctgatcggtgcgatgtaggttctaccaatggcgacaacgccaccgtgatttgccttattccaatcctttaagaaggcatagtgttgaaaagcattcatgtcaatatcgcccgacttcaaggccttgttaggttggttgtaatccgtaaagttcttagtttttaaggtaataccatatttttccttagccgttttagcaattgacttccaaattgcggcttcggctttactttccccaacgattccgactgtaacagtttttgtctgattttgactgggaattcctggaccaaaactaaaccaacctgcaatcacgatcagtatcccaatgatcgtccaaataatggtatttcttcttctccgttttctcataaaatacactcctactttgataaaaataaaaaagcacccatccccaaaggacgagtgctcgcgttaccacctttaattcgctgatcacttacgtaatcaacctcactggctatcaaaaaatagcctgcactgttaacggatgcagccccgccgatagctaaatatcaccaccggtcatcgttccaaacccatattcactagctcctatttgccaactttcaccaccacgctggctctctttatcaatagaagttctagttactcagtccttcaagatgttgttttcttgatttgttataaataagttatcatcttcttttaatctagtcaacatcttttttaatttttattagataaaagcgatttcattgtataattaggatatagttaaataatttatttttgctaaggagaaaaaatgaagaaaaatcgctttcgaagttttgctctctcattagctgcagcaattggattcatttcttttgctaatactaatgtcccatgcaacaatcaaaccgtctatgctgtttcagataaagcattagtcaatttgaaataccacaacaaacaaattgtgaccgttgatcatgatcagccgcagttttctaagagtacattgagcaagaaaaaaggtccatggcaaaaatatagccaattagattatttgaaccgagctcatgctgctaatgctttactaaataaaagattaatgccacatagtcagcgtgcggctttaacttggaatccgaccggctggcataataaacgaatcgctagtggttggttgtataatcggtgccatctaatcggctatcagttgactggtcaaaacaacaatccacgcaatttgattaccggtacgcgtgaattaaatgatccggatatgcttaaatatgaaaatgaggttgctgaatatttacgtagttcgagcaaaaactatgtccgctatcgggttactccaatatttaaagggaatgacctattagctaacggcgttgaaatggaagccgaagcaactagcaaaaacgggcttcgctttaatgtctacatttttaatgagcaacctggtatgttgcttaattacaagaccggtacttctaaggttaaacatgggtctagtactattgctgaacatgtaaaatctagaaaacgatccacttctcgagtaaccaagaaacgaaccattcaccatatcaaaggtactgtatccactgcagaacaccgagtcgttggcaatcgtcgcagtaagatctaccatgtaatgaacgggcaaaattatcatatgtcatcagctaatgcagtttacttcaacagtgaagctgccgcacaagctgctggatatcgaaaatcattaaggtagtaaaaaagtcagagcaaaactctggctttttcattatcttcttatttcacattatttttgccacgatcatatgcttccttgaattccacaaaagtcatgttctttcctttttgatcaaagacaaccaacacttcggcgattccatccaaaattttagataaccatctaaagatagtcactgccgcacagaataagaccgccaaaataaataatgatttgttattaagcattgtcaatgagaacaatcttggaaaaaagatagttgagccaataatacagataactgataagcccataacagcaagtctaaatttgtttattggtgccgaaatatgatacatcaccataaaaccaactaagactagcaacatagtcgctgtcgtgcctacctgaccatgatcaagtgagatagaggcccctgcaatgactaaaattgcaactgccagccaatctgttaagccccctggaattgcccgagctaaaacatttggcataaactttccacgaattcgcttgtggttgctttctaaggccaataaaaacgacggcaagccaattgtaaatgcagagatcaatgtgatctgggctggctgcagcggataattgattgtcataatcaaagagaagatggccatcaagaatgaaaaaatatttttcaccaagaacaagctggctgaacgttgaatgttattaactacttgcctgccttggttcaccactaacggcattttagcaaaattagaatcgagcaaaaccacttgtgaagcttgcactgcagcactattaccagaagccatagcgattgagcaatccgcctttttcatcgctaaaatatcgttaactccgtcaccagtcatggctacggtattaccttgattttgcaaagcaacgacaaactttcgcttttgatcaggcttaacccggccaaagacattatagttttgcacggcctgctcatattcaccatctttaatggtttgcgcatcgatatacttatctgccccattaattccagcttgcttagctactcgagcaacggttaccggattatccccagaaataaccttgatatcaacaccttgctggttaaaatattgaaaagttgacttggcttctttacgaattggattcgacaataaaatataaccgagaacttgtacattttcctttaaggcggaattatcttcagttaatacgccaggataattagccgcaatcaacacccggtagccttctgccgcatatttttcaaattcagtttgatattgcgcaaattgatcacgcaaaaccatttcaggcgcaccaattaaagttgtctgattgccaaaaattacaccagaatatttattgactgaggtaaaaggcaaaatgctatccgccgttttggttccatctttaaaataggcttgaatcgccttcatcgtcgcattatcagctggcatgtttttagcaaaatccgcaatgatgctacttaaatcaccagtaaaattcttgctactaacagctttttctacggccatcttcggttcggtaattgttcccgttttatctacacaaaggacatttactcgggctaaagtttcaacactcttcatatcgtgcagcattacttcttgtcgcgctaatcgcatagcagctagagctaaggcaatcgtagtcaataaatatagcccttctggaatcatcccaattaaagcagcttccatggaagtgatactacgcttgagtccaatattattcaaaaagaaactctgactaaatagggcaattcccaccggaataatgatgatgccgacccatttaaccagacgattgattgaacgcaccatttcagattgttcaacactgcccattgcctttgcttcgatcgttaatttagaaatatatgagtctttacccactttttctaagacggcataagccttaccggaaactacaaaagaacctgacattaattctgcgtctttagtcttagtgatttcatcagattcacctgtcaacaaggcttcattaacccgcagctcacctgagattacccgcgcatcagctggaatctggtcaccagtttgtaaaagaacgacatcatcttgaaccaatttttcgatgggaattttttcttcttgcccatcacgtaccgcgataatttccgtcgcattcatcacgtttaacttgcttaaaacttttttagcacgaagctcctgcacaataccgataatcgtgtttaaaacaatcactggtaaaaaagtcagatcgttccaggcaccaacaaacaccaatagcacagccaaaatagcaaaaatcaagttaaaataagtaaagacattttctcgaattatttgagtagctgttttggactggtcatcaatggcttgattaacctgtccattttgaattcttggatcaacttcagcttgagttaatcccgttatttgtttatctgtcataattttctgtcctatactgaaaatactttcatccattatagcgaaaaataaaaaagccacgcaactctgcgagactttttaacaattatttattttttctatgataagttaaaaaagtatagtcatacttgttcttttcatcatgatgatgctcttcgcgactaactaattcaaaatcatcatagttaatcgctggcatcactgtatcagttttaaaattagctttgatctctgttttttctaaaagatcaacttgatcaagtaacgccctaaagattgaaactccaccaattgcacagatttcttcagtctgatgttgacgaagatattcatttaattcagctaatgtggacacaatcttcacttgctcattacccgcatatttttgctttaattcttgacgatgagttaaaacaatatgttttctctctggtaacaagtgaggcaaactcgcaaaggtttttcgccccatgatgatcggatgacctatggtcttttccttaaaatgcttcaagtcagccggcagatgccaaggcaaatggccatcgatgccaataccatgctgctgatcttcagcccaaacaaaacttaacattgagacctcctaaactgcaaccggtgccttgatcgtgccatggtgctgataattcagcactttgatatctttcatttcaaagtcttcaatgtgctttttttcaggattaagccacaattcaggtgaatcatatggcgtccgactcagcaattcctttacttggctaaagtggttgcgataaatatgtgcatcccctaaagtatgtacaaattcacccacttttaagccggtttcacgcgcaatcatgttcaagagcagcgaatatgaagcaatattaaatggcacgcctaaaaacatatcaccacttctttgataaagctgcacgctaattttgccatcgactacataaaattggaacatgacatggcatggtggcaaagcactagttggcacatcttccggattccaggccgtgacaatcattctacgagaatctggcgtttccttaatttgcttaatcacgtcagcaatttgatcgataaaaccgcctgtccgcttttcccaatgacgccattgtgccccatagacatcacctaagttgccatatttctgggcaaaagcaggatcatcaagaatgcgctgatcaaatttcttcatttctgcttgataaacttgattaaattctggatcactttgactacgcaaaccaaaattagtcatgtcaggaccctgatattcaggactttgaacccaatttttgaaggcccattcatcccaaatatgattgttatgctctagcaaaaagcgaatattggtatcgccacgcaagaaccacaacaattcacttttaatcaaaccaaatggcacctttttagtcgttaaaagtggaaagccctgtgtcaaatcaaaacgcatttgggcaccaaaatatgatctagttccagtaccagttcgatcatccttgtcatgtccttcagtcataattttttctaacaaatccaaatatggttgttcaagaattgccattatcttcacctttcaaaaaacatttcttctaacataccatagatcttatatgttggataatgaaaaaccatagatttagtgtttttagataaaaataaaaaggtgaataatcaccttaattacttttcttaaattcatttttgtgtctaactaagtagacgattgttgccacaatcaagactaatgcccctgcgataactgaaattctcgtatcaggattgagaaacatgaaaattacaatcattatcaacattgcaaaggcaaagtaatttgaaaatggatataacggcaatttaaatggatgatcttgtatcgcttctttgttatgccgtctaaatcttaattcagctaataaaatcacaaaccaaggaatcattcctggtaaaacagatgaactgaagacaattacaaataaatcactagctgaatgattaaattgtgaagcaattacgttcaagacaaaaccaataaaaataccagcagaaatccccataattgcacgatcaggtacaattcgcttagaaatatgcttaaaaattcccggtgcttcgtggtcatgagatagcttaaacaacattctgctggaagaataaatccctgagttagcaccagaaagagcagccgttaaaacaacgaagttaattattgaagcagccgcagtaatccctactttagcgaaagtcgttacaaatggtgaacctaggctgtctaatttatcccaaggataaatcgttacaatgacaaaaattgctccgacatagaaaattagaattctaaacaaaactgacttaacacttttaacgattgcctcttgtggattggctacttctccagcagaaatacctaataactcgattccttcatatgaaccaacaatgattgacattgaaaagaaaaatccttttattccaccagtaaagaaaccaccgtgagaccataaattgctaaagccagttgggtggccgccattacctacaccaaagaaaataacgataaagcctaaaataatcattaaaataatcgttattactttgatcatggcaaaccaaaattctagtgatgcataagccttagcactagctaaattggctagtagtaaaaaggcaataatgatgatccccgaccacagcgccgaaatattcggccaccaatacttcagatattcagttgccgcgactacttcggacattcctactacaatatattcaaagacattggcccacatcgctaaatagccggctaagggatgcacatattctgttgcataatcagcaaatgaacctgtccctggattgatataaagcatctcacctaatgcccgcattacaatatataaaatcaaccccacaaacatgtaggctaataatactgacggaccggtccatttaatagtcgaggttgaccccataaacaaaccaacaccgatagcaccgccaagagagatcatctccatttggcctgctgtcattgttcgtttgagttgaggagctttagattttttattcaattttcacaactccaataattaatctatcctaattaataacccgcaattagtttactggttaaatcaacattttgtcaaggttcaaattaaaaatattaatatttgggagtcttttctctaattgattttttattcttttattaaatgaatttcgcgatcaaacatttcctgcatctgtttattaaaattgtgagcaataaagacaattgtggtcttgctttttaataatttttgtaaaatatccatagtcgctgtctgatcaattgcactagttccttcatcaatcaaaataatgtcactatcatggatcttcgatcttgccaatacgatcttttgtcgttgtcctccggaaatattcaaattatccaagtcaattttttcatcgacacctgctttaaactttttaatatcggccgcaaaattaacttcatcaagcacttgagctacttgattattaagttgcttgttgaacattgtaatgttttctttaattgtacccggaaataggttcggctcttgtggaatatagcctattcttgacatattaggcttaattgtcaaaccttgactattttgaaattcaattttgcctgtgctaggtttaagttcacccaaaatcaatttaaataaagtagacttacctgcgcctgaatctcctgttaataagattttctcgccaggtttaactgcaatatcaggaaaagtaagcttttcaccattaggatactgcaaagccaaatcttttgttgaaaatgctactggtgtctcttcttggccagctttaactttttcaatcacagtagcatcaccatcaacttgtttcattaaatcctgtgacgatttcataaaacttaatgcctgaattgtttgttgtaagccgatcgaaatattagctgcaaagttttggacagacataattgcaccaaaaatcactaaattcttagtgatcaaaaaagccgtcaaagacaacaggattatttgtcctaccatgttacagatcccattcaaaataattaattgctgttgagcagccgtttgtttaacatgagcctgttctactttacttgaagttttttcacctacctgaaataacttagcaccagcaaaatatcttcttaattcttctaagccagagaaccatttagctaaaacatctagataatgcttattttgctcagaaacattattagttgcttgttccattttcttttgtactaatttaggtacaaagtaagaaacaatatcaatcactacactagtcaaaaagattgaccaattaattgtaagtagagccaccaatgccgcaacaaacattgagccatagaacggcacaattggataccaatcaaaataattttttctaatcatttctaaatcattagtcatccgattttgcacggccggtacttgatgattttgaccatctctaaagtaatgtgtagccaaacgagcgcgcacctttttattatattcttcttcctgcactcgaattacaaattggatataatagatcatcccttgagcagctaaatataaaatccccattaaagccgtcgcaagtaaaatcttcacccaagcacgatctttgatataagtcagccagtacatttgaatgtagcctgcaccaatagcgaaactgtcaaatcttttgtgtaaatagttctttctcgcaaattgattttttaattatttatttaatcaaagtaggattctaaggtgtcctgaacctgaccaaagcctttatgaattcgattgaaataacggtcattgtagctcattgcctgaatgccaataaaagcatcaagcgactgttcagttggaaactctgccttaggcttagctttgcgcttgatcacattgttaaatgattcaatcatgttagtcgaataaattgaagctctgatctgcttgggatagttataaaagaccagcagatctggttctatgtctttcaagcttctgataacatggctgtaaaccttgccccatttggtatagaagtcatgcaggacagctgtggcttcttctttgtttgtctgttgatgcacctgtttgaattcgttcatgatcttttcacgatcgtcgacgcgtactttagcgcagatattgcgcatgacatgaaccaggcagcgttgaaaatgagctttaggataagtcctggccaaggctgttttcatgccaacaacaccatcagaaagaaaaagctcaacttgctttaagcctcgggatttcatgttttgaagcatatctgtccagacttcaatgttctcgctaggtgcaatgcagtagtcaatgacctccttgtgcccattaggcttgatgccaatggcaatatagactgcttcacgctcaaatgtttctcggcgcaaaggaaggtatgtcgcatccaaatagacgcagaaaaacttgtcgcttagcttgcgtttgtggtaagcctcaacctttggaatcatctgcttggaaatatttgatacctgagctggactgtaatggctgccatacatcttttcaattagatcggctatttccctggtggtcacgcccttggagtaaagcttgataatcatgctttccaagatatccgagtgctgcttgtagtcaggcagcgtgtgctgatgaaattgaccgttgcgatcccgaggcacttgcacttcaattggtccaaactgggtatcaaccttgcggaaataagcaccatttctagaattgccagtattccagccatttctggcatagggatcatagcctagaaaggcagtcaactcagcttctagcaagttattaacagcctgttgtagctctttgcgcaataaatcatttattttgtctggattgaatagagcttgagcaaaatctttggtaaaatcattcatgaaggagttcttctttctgtatgtgtttttttgttcaaaccaatcatacgagaaaggaactcctttttctaatgttttaagaaataaatttaaggaattattcatccttacacaaactattttacagtctcccaatagcagcgacacctgaaataactgataaaatattaatgtaaataaatcttaaataattagttttaataaagcctttgaaactcattcggcgtcacctcgattagtcaatttaatttgccgatcaaacattgaaactaattctgtagaataattgtgcgcaatcataattacagtacttggagtattcaataaattttgtaatacttgcttcgtcccagcactgtcaattgcactagtcccttcatcgatcaatagccaaggtgattgatgaatcaaagctctggctaacacaagcttctgcctttgtcctccagataaatttcctttatccaaatcaatttgactattaagtccagcagacatcttatccaaatccttggtaaaacctacttgatctaatacacctgaaatttgattatttaaagcactattaaacatcgtgacattattggcaattgtgtcaggaaacaaggtattatcttgagcaatatagcctaattcatcaagatcaaaatttaatttttgaccattatgatcaaaaaaattgatctcaccttggctgggcgttaatttacctaaaattaatttaaataaagttgacttgccagttccactatcaccagtaagcaagattttttcaccttgcttaactgtaaaatctgggtaagataaatactcaccatttttgaattgtaaggccagatcttttacttctagcctgttaatcttcttaacttgatgctgatctggagctatttttactggagcttgaagattagtaatttccttattcaaatccttggtggatttaattaaattccattccgttacaaatgctgaaacaccattcattacagttgaactaaattgaatagtagtaattaccgcaccaaaaacaatttgtccttgcaaatataagtaagcacataaaaccatcaagagcatttgtcccacaatattaactacaaaggtgatcatatctgcaatagcaatagttgctccttgatgaatagctgcttttttatattcgtctgcgctttggttaactgattcactaaatatattaaaactggcatatcttcgtaattcatccaggctactcatccacttggctaaagtgtttaagaacttttcatttttcttagtaacctttattgtggccgatgaagtcattttttcaaaagttttaggcaaaaataatgaaattgcagttaaaatcaccgtcattactactaaaagccagttaaatgaaaacaaaattccaattgagaaaagcacagacaacaagtacataaaaccgtttttgattggttttaaataattctgtgttagctgatcaagattggcaaccaattcattttgcactttagcagtttgggcaatttcatttttaaaaaagtagcgactaatttttacacgaatttggtgcaaataagattgtgattgctttccgtataagtaatctgaactagtaatcaaggctaatctaactagatcacagccaatagccaaacaaataaaaataataaagccaaataaattcattttctttagctggttaaaggccggggtcatcaaatattgcgaagcagcatcaacggttgtaccaatgataaccattagaaaaattaaaatgaatttagctttattgaccttaaaaatccctgtaatactcatttgtctcatctccaagcaaattaaaatattaaaaatatcttatttatgtttaatattactgctatttttttaatattcaattactttttactaagtggttaaaaaaataacttgaacggcaaaattattactatatctagctaattcattaggaaaaattggcaaaaaaatagactagaaactcattatcaagcttctagcccattagtttaattcaattattaacggtaattcttcaagaaatctatcatcttttgataagctgcatcatgatctgcatcatatgcatcgactacatcgactactttattatccttagtaataatacggtactcacgtaagtctttcttttcattagcaacaactgtaatctcacccttacctggggtagagaacaattctggattaagttcttcgttcaacttatctgataattgttggttaaatgcgattgtattcatttttgtttttatctcttttctaaaaaatccaacacagacattatatcattattagataacgttgatgaatttagttttattttttatcaaggagaactgtacctgcagaaggattatgatcaattgcaccaatgatggagcagtaacaccttcaatatagcacagcaatacttattcaaaaaatatcaatttgttattttgcattattacttttacatatagatttcacttaattaaatgcacaacaaacatggcaattcctaagaatacaaaaattaaggcaacaatcatactagttactgtgctggtaactaaaactaaaatgatcatgccaataattgaataaatatccatttgttatccctttaattaaacaataacagcagtatttacttttattatgtagcatgaacactttaaaatacaattttaacgtattttaatttgctaactttcgatataacggcaatagctgcccaataccatctaagatgaagttttccatatctgcaacttgatcttgctttctaaaagcaaattttcctaataggaaactggattgagttgcttccttattaaatgaagtctgtttttcagcatctgttaaatactcatttaaggataaatgatcagcaaactccatttcgtttttatcccataagtaccaattattagttgtccgcccttttgcccaatcaggaagatcagttaataatttattgtattgttcaggattatcgccgcgcttttcactcttataatgctgaaacataagataaacctgcagctgcttattatccagcatcacgccgatgcatggacttttatcggctaaagcattcaaacgataagctgcccagtaatgatcgcgtaagttccaaccattggtccaactttcaacatgaactttagcaaatttatcttgtggtaatttttgataaacatttaagtttatttctttccaggtctgccaaatttctttaaaatctgtttttatttgcgctaattcatcttcagaatattgcgatttcaattttttaaaagaaaattcatcccgatcaaaaattgcatacatttcttcagttaattgcgtcattttacaaagtccttaccatatttacgctagtaacaccagttggatctggaatatcatcattggtctcgccttcattataaaaaccacgtttttcataaaatttaatcaatttcggtaaacaagttaaagatatagcttgacgattttgctttctgccctcttgcgctattgcttcaattaattttgtcgctacgccttgtttgcggtattcaggcaagaccgctaaactcaagaccatttgatagcgatcatctttttgattaggatgattttcaaaatataattcatcttcaatatagcgtttattaaaagcaggaccaaaaatatgaccaatcacttttccatcttcttgtgcaactaaaaaagtatcaggataattctcaattctaccaatcatatcttgttcagtttgctttttagtcatcttaaatgcgtcagattccagttctactacttcatttaaatcatccattgttacggtgcgaatgatcataataagcatcctccttaggtttatctctaaaagtgaaaaagggttcaaaagtcatttagactcttgaaccctatattattactctctatttaattcttccactttaatttaagacgatcttgctcagtctttttttgaaaatacgtcttcaccttcggcactacttcttcgccataaattctaatggcattcatcacatcttcatgcggcattgaggcaattggcaaatgaagatagaagcgagttaacccaagttcttccatgactttgatgatcttatttgcaactgtctcgctatcgccaacaaaaatagctccattttctccaactgcctcaagatattgttcatatgtcatccctgtccattgcggtctttccgtactaatttgatcaactaacaatttcgtaggatagaagtaatccttaattgctttgtctttatcatgatttaaccagccccaagagtgtgcagcaattggcatcttcgttaaatcattgccaactttttctgcaactcttctgtacaacttaattagtggtttaaagtgcaaaggattaccgccaattatcgcataaacgattggcaaacctaactctgcagttcggatagtcgattctatgcttccacctgtagctacagaaatagggattggctttttagtgcgcggataaattcctttatgatcaactctaggtgtaaactttccttttggccaatcgagaatttcttctttgttcattttgagtagcatttctagtttttcaataaaaagttcatcgtaattttctaaatcataaccgaatagatcaaatgcctcagtaaatgatccacgtcctgccatgatttcaactcttcctgatgcgattgcatccattgttgcatattgttcataaactctaattggattaattgttggtagatttgtagtagcacttgaaagatggatttgcttagttttcgaagcagcagctgctaaaatgatttccggtgctgagacagcaaaatctttgcgatggtgttcaccgattgcaaatgcatcaatattcaatttgtctgcaagaatgatttcttctaataagtctctgattctttgatcatgactaattgcttttcctgttgtttctaatggtgtagtttcaccaaatgatgagatacctaattcaatattcattttatcaactcctaaattatttcacttactttttgtaagtaaaataatagcagataatttttgaaaaagcaatatcttgaatatgtgatcctttacttagttgcagttcttctaccaacatatttgataaataaagccatgattaaaataactaaacataaaagaaaaatatatgcatgctgtgttccgattctggttaaatcagctgacttagtacctttttgactagaagcaacgattgctgaagtaattgaagttccgacagcaccggcaaattgttgagcagtatttagaatagcgttgccttgagtagtttcactctcatcaatcactgccaaagtatcagtcataacatctcccaatatcattcccattactgccatgtaaatgatataaactatcaatataaaaatattattcatctgattaggtaatactgcaaaaaacaatgtttcaagcaacatcaaacttacaccaaataaaacaggtttgcgtgcaccataattatctagcaaccgaccaccaattggacccatgattgcaccagcaactcctgctggcaaaacaatcaagcctgctaaaaaagcagtattatgattaaccaattgaatgaaatttggcaataaaaatgcattgcccaaagatattagttgaatgcagaaaaaaccaataatatgacctgtaaaactatgatttttaaataattttagatccaaaattggcattttaattcgattagatctccaaattaacagagctaaagctaataaagcaatcaaaatttgaatagcagttgcacccaattgtcctgttcctaagttgctaaagccaaccagcatcccaataaagaagattgcaattatgataaagctaaggcgatcaatcttaacttttttaacagcagatttttgttcaataccccagatgcctaataacaatgaaataataatcaatggaattaaaaaccaaaaaacctagcgccaattcagttcctgtagaacaatcccgccaaaggtcggcccaagtgctggtgctattccagtgatcatactgccgacacccatcatagtaccaactttacccttaggcacttgttctaaaatgatgttaaacattaatggcagggcgattccagtaccaatgccttgaattactcttccgatcaatagcaccggaaaaattggtgcagtagcatcaactattaagccaagtaaaaacaaaaaattagcggttaaaaatagacttttagttttatatgaactttttaatgcagcagagattggcacgataattgaaactgcaagcaaataaattgaagtcatccattgcacaacattggttgaaacattaaaatcacgcatcaaggttggaaaagcaatattcattgaagtttcaactagaacgccagaaaatgacattaatcccgtggcaattactgctgcaaacacttttgatgatattctttcattatttgattccattttttctccatttttgacaaattttaaaacttttagtgccgtatttatttcagcttgtgtaaaatgactacgaacttttcgatcatcttgacgcatataatcttttatcttgggaataagtgatttactcttagcagttaaagaaacatccttctgtcttttatcgaccgcattagtaacgcgtttaactaaatctcttttctccattctttgaatcatgattgtcaccgttgaacgctttaaatctagtttcttttcaatttcatgttgtgaaacagtttgattttgatgattagaaataaaatctaaagttgtcatttgaacgccggtgatacccaaagtgttagcaaacgtctctcgttcacgatctatttgaatggaagattgcttaataaccttttttatcggttccatataggtcctccttttgttagatgtctaacatattttgcatttatatttgttagatatcaaacatattttttactaatttgagactttagttcaaagtaaatactagtaaatatctatttcatcatttgacgtaaaactcacatctaattctttgagactgtaaaatattttgtgtaaggatgaatgattccttaaatttatttctttaaacattagaaaaaggagttcctttctcgtatgattggtttgaacaaaaaaacacatacagaaagaagaactccttcatgaatgattttaccaaagattttgctcaagctctattcaatccagacaaaataaatgatttattgcgcaaagagctacaacaggctgttaataacttgttagaagctgaattgactgcctttctgggctatgatccctatgccagaaatggctggaatactggcaactctagaaatggtgcttatttccgcaaagttgatacgcaatttggcccaattgaagtgcaagtgcctcgggatcgcaacggtcaatttcatcagcacacgctgcctggctacaagcagcactcggatatcttggaaagcatgattatcaagctttactccaagggcgtgaccaccagggaaatagccgatctaattgaaaagatgtatggcagccattacagtccagcccaggtatcaaatatttccaagcagatgattccaaaggttgaggcttaccacaaacgcaagctaagcgacaagtttttctgcgtctatttggatgcgacataccttcctttgcgccgagaaacatttgagcgtgaagcagtctatattgccattggcatcaagcctaatgggcacaaggaggtcattgactactgcattgcgcctagcgagaacattgaagtctggacagatatgcttcaaaacatgaaatcccgaggcttaaagcaagttgagctttttctttctgatggtgttgttggcatgaaaacagccttggccaggacttatcctaaagctcattttcaacgctgtttggttcatgtcatgcgcaatatctgcgctaaagtacgcgtcgacgatcgtgaaaagatcatgaacgaattcaaacaggtgcatcaacagacaaacaaagaagaagccacagctgtcctgcatgacttctataccaaatggggcaaggtttacagccatgttatcagaagcttgaaagacatagaaccagatctgctggtcttttataactatcccaagcagatcagagcttcaatttattcgactaacatgattgaatcatttaacaatgtgatcaagcgcaaagctaagcctaaggcagagtttccaactgaacagtcgcttgatgcttttattggcattcaggcaatgagctacaatgaccgttatttcaatcgaattcataaaggctttggtcaggttcaggacaccttagaatcctactttgattaaataaataattaaaaaatcaatttacgagaaagaactatttacacaaaagatttgacagtttcaattctttactaagaaaaggattttagttacatttgttgctaaaatagatttattatttctactcaaaataaggagttaatcataaatgaataaactaaacttcgaactactgcatatttttgatgttgttagtagatttgctagcttcagtcaagctagcaactatctctacctagaccaatctactgtcagtaaaaaaattagacagctagaagctattgtcaataagaaattatttattaggaatactaatggtattgtcctcactgctgctggacttgcttttaaaaataagtcagataaaatacttcaagatttaaaagaaataattgcgctaaagccaactataaccaccttacgagtcggggtatttgataatataagtgcctatctgatgcccgatatttttgctgaaaattttaatctatttaatgagggaaaattagatgcaatagttatcaatagcgacttctttactcaaattcaaggttctgcaattgagacgcaaattactaatgaatcttttgcaattctctttcgcaaaaataatgctctcattgcaagccaaaatagtatttcgttaaatgatttaaaaaataaaaatcgtaaatcaaaataactattataaaaaatatttattggtaatagttagctatgcataaagcgaatgaataaagattattaattagctattacgtttcttaatttggcgattttgtgttaacttgattgttatccaaataacaacgtatgaaagaataaaaataaacaatgtccaaatattgatagaccaattatttaacaacatcattattgagaataagctaaaagttccaattaacataaaaagtcttcctttccgaattcactatttaaataagtggttaaattcaaaatacaggatgctaaaatttaaaatcctaaaaattaatatctgtaagctaaatatttaagttattgaactgagtttgctatatttaagttaaaagataataaaaggaggaatttcatgaaagttacttttaaaggaaaagaagttgaattaattggcacaccacctaaggttggcgatgaaatgcctaactttacagttttagacaaaaataagcaagaagttactaaagataatttgttaggtaaaaatactttaatcagcgttgtgccagacatcaacacttccgtttgcagtattcaaactaagacttttaacaaaacaatggatcagtttcctgacgttaactttttaactatttcaactaataccatcaaagaccaacaaaattggtgtgcggctgaaggtgttaaaaatatgcaattaatgtctgatgaaaaattatcttttggtaaagctactggcttactaataccagaatctggaatactagcacgcagtgtgtggattcttgagcctaacggtaaaatcgtttatcgtgaaattgttgatgaaattactcatgagcccgattataatactgctgtaaatgaattaaaaaagttgctgtaaaatttaaaaaagattgcctcagtacatacacatatgctaaggtaatcttttttttctacccaaagtcaagtattatcaatgatttaagaaaataaatttacttgttttaatgatgcgaataaggttaaagcaaataagagtttaaatttaagaaaaagcgaaagtaccacaaataagcctatgaatacttgtagtttttccataggttgcttatacttaagttgattatttgatttcagctaaagtcttttattttcggtggctatgttgtaatcatataattgatcatgtttgataagagcaaacattgtgcgtatcagtttatggactgatgcaatggcgattttcttatagccttgtctatttgaagatcgttttttcttgtcataataatcagttatatggcaaggctgcgtagcctttaccgtctccatttgagtaataactcgataaagtatttttctggcaatatgattgccatgcttggtaatgccaagagaactgtctttttcaccagattggtaccttcctggatcaatgccaacaaacgcatcaatttgagctgaagtgctaaaccgtcttagatcaccgagctctgctactaatctcactgctgtaattctagcaacccctgggatactcaaatagatggataaagcacgagcgtttactgctttagccagcttttccatgtagttaattacatagtcgcgttcttgctggagtgaaaacaaattagaaatgttcctttgaatagctctaacgataatactatctttggaatcataaggataagcttctctagcaaaagcgtataatcttgtggttaagtaccgtgccctttgttgtcctattccagaaatagaattaagcatttgagttacctgtgtctcattcttttctagaacatatccagcatgtgggaaaagactaacaagcgcccaataaattctgccagatggatgagacagtatttcttcaatttgtgggaaagtggattggaggttgcggtgcaattgatttttagtagtaactatactcctagtaagttcttcataatagcgactggcattctgaagttcatgatactctctgggctgtggatcacgcaacttttgcggggcattaaattgaattaaagccaggcgataagcatctaccttatcagttttattatggcgtaaattattgtccattagctttttcgctttaagcggattaagcttcaaatacttaatatgataatcctctaagaaagcttgcaggcttagagaataaacaccagtagcttcgaaaacaactaaaggagttatcaaatattggttcagttgctcataaagtttttgatagccaaaggaatcattagagattctaaaagattcgccttgtttgatccggtcattaaccacacaaactgtggaagatttactgctaacatcaataccgaaaataatttgtgattccataatataacctccgctgtgaagataaacctctttatcaacctattaattctaattttctaaacacggcatctaagtgcccacagacttcgaagagacttaagaataggtggtaaagcagtccgtttcttttacgacatcaagtgtctaaaaagctgaagacttgatttgctttatcttcactttctattttagacaaaataaaaagtgccagatcgtgaatccgtcgattcatgatccaacactaggttagtatgtttctttagttcttatattgttccattctttgattaagttcttccttattaaaattatctaaattaattgcttttccacccattaaccaatcaatcatttcaggatctactttatctttaggcgtatcgtaataatcttgcaaagaccatacaccaccaatgtcatcaattattccataaccttttccagaaagtatctttggacacttaggagctgcttgatcagtagtgatgttcttaatatctacttcgaattcccagctatcgccataatcataagttaataataatttatctctcttttcaaaatacgaaaccttagctttttcataatctatgcctgtagccggatcccaatctttcgcttcagcgatactttctgcattttcaaagcgttcctgcgtttttttattcagcaaatcaaacatatgtccaaaatctgcattaaacatatctagcatagcaacttctaatgttttcactgacgtattgccactaataataaatctacgccaagtagatggtttaaaagactttagttttactctaatttcataggtagctcgattgcgagtttgattttcaaaaattgtcttttttcgtgttttctgctttttatcatgactctcaagatcttttcgcaagccttctaaaattctagacaaatcctgagaagacagatctaaatcttcaagttccaaaatctttttcggatttgcttcaattgccgctatcatatcgtttatcaaatcctcatccaggccttgatcggagtatgaattaatttcttcaactacccagtcaatattcatccctatttctttactatcagttttacgaataagacctactctactcaaaaatacatagaaatttttcaaagtatttgtaatctgctctatttctagcggatgtagtttattgttagatatcataatccataaataagaaatcgcttctcctaaatcattagtaactaaatggatcttattacgtaataaataatgatttagataatccggcagcatttgatcaggttggatatatcctattcctgctggtacatatttagcatattgatcaatgagtttttgattattttctttaattttagcaacaatcttttcattgccttttactggtttattttcatatttttcaaaattagagaaatcttcaaattttggcactaagtcaacatacttatatcttcgatttggtttttgcggcttaatagggaaatacgtactaacctcatcaatcatcttagaaataaaattttgtccaatctgactatccaaggcaaaaatagtcgctgacattacagttagcttatctacgatattcttttcatcttttacaacatcaatcaaatttaaatattcgctttgattatcctctataagtttacgaattttttctagcattaaactagcttggcttttagtatcgtaaaaagacatttgcttggactttaccgctgaaactaatttttgttgctgtttaaacaaaataaagtcatagcttttaatcgcattagcaaaaacatcattaaacagtttggtatcaagtttagttaataaaattggaaaactagtgtctttttcaactaataaatagtacttttgcttttgaatatttattacatctgcatcccaaacagtaaaaggctcattcttaataatatcaatcttattttctttaatttctggtgctaagttaataccgtatcgtactggaagcatgtggttctccttattaaaataatttcattttaattttatcatgtctattcacaactattcatctcagaagcaaaaaaatgaaggcaatcactgccttcatctaaaatacacaaattttagtcttcttctaaaaccggtactgtctttttatttctaacatgatatacaactaaaccaattgctaaacctaccagtgctggcactaaccatgataagcccatgctggcaagtggcaaatgatttctaagtgaagccactgctaaaccaaatgaactttgactaaccacacttgggaaagcaactaccatatcgcctaaagctggtacaacagtaaataggattacgaaaaagtaaactacacctgccttattaaacaatggtgaacaaactgatagcaagatcaaaaccatggataaaggatataagaacattaacatcggtgttgaccatgaaatgatttgatccaaaccaaagttagcggctaagaatgatgccaagcaactaagtgctaaccaaacgtggtaacttaccttaggaaaatgcttatgaaagtcttgcgcaaaagcagcaaccaaaccaactgcagtagtcaaacaggtaactgtcaataagaatgcaagtaaagcttgaccaaagacaccgccataaacgttaacgatttggttaaaggctaccccaccgttatcagaaactgcaaagcgtccgagagacattgcacccattaagatcaataacaagtagataaaaccgattgctaaaacggccaagacacctgatttagcaacaacttttgaaacacttttagcatctttttgtcccatgccacgaacagctgtaacaactgtaaccccaaaggctaagcctgctaaggcatccattgtgttataaccctctaagaagccatttactaatgctccatgcttataagcagcagttactgcagcagtttgtggattccccaacggacgagcaaaagctacaagaaacactaggaataataatgccaagaataatggatttaataccttaccaacgttagacaagatattattttgatgataagaaaaagcaaaagcagctaaaaagaataaagctgagaaaacaagtaaagcggaactttgcatattcttcggcataaatggtgcaataccaactgtgaaagaaacggttgcagttcttggggtaccaaacaatggtccgattgtggcatggattaaaaccataaatactactgcaaatccggcacccagcggcttaccgatgtcgtatactccgtttgcatgagtaattgctactgctaatacagataataatggcaataaaacccctgtgattaaaaagccaattgcagctgttccccaatttgctccagctagttgtcctaaatgtaatggaaaaattaggttaccagccccaaaaaataatccaaacagcaaggaagcaacaacgagataatttttccatgtaagttttttcgatgtatgatctgtcattttctctcctccaaaacatccctgataaacaaaaaagaccctcagctgcaaattgcaactgagggacgctttgagcgtggtaccaccctttatttatatcactattgctagcaatacctttcacgtacagtcaattacttgacgatacgtaggcactataatgggtgctcccactacttcttactttaagttaagaaatagaactcgaaagtgattttcatttaaacttaggatttatctcctcacacctaacgagactcgctgtaaattaagtctaaattactcttctttctctttgttttcagatttattaaatttgttaataactattttaatcaaaatataatcgttgtcaacaacttttttatttatttttcaaattttctattcaaattgagtctgccaattaggatcattatttgccgcaaaacacatggtaatttgttcctcagtatttcgcccaagtgaaagcttcggtaaattatctaatgcaaaataatcacaagcatcagtttcatcgttcggcttaaattcaccactaatttctttgcataagtaaaataccttcgtaatgttggtggccaaaattggtttattatgatgactacgatcttgaactgcaataattttgacgggtctaactactctacctgcttcttcatatgcctctttaacacaattttgtgctgtagtttggtcataatcattccagccgcctggcaatgaccattcctgagtcattttttcacggacaagcaaaattttattatccttaaaaattgctgctcgcgtatcaatcttaggtgtttgatagccctcatcacccaaaaagagtgttttaatttgttctttaggtagtcctgtcctagctgccatcatttcgcctgcaattttacggattttttcatagcgctcacgatcaaatacatcatgaccataatgcaatcctgcttgagctaaactttgtaaatctgtcgcccacttgataaattgatcatctgaattcatttttattgcctttaatataaaattctaagaaaaataacaaattccaaattaataggcagattgaaatacctattttagattttatcacaacccataagtaacttactcctagtgcaaaaattagtagcaatgttaacagattacgaatactaaatcgacattcactcttattatatacttgatttatagctaatgagaaataatataaggccattgaaaaaataatcaggaaaaataaaaaagttttgtttatattctgcacttgtaaatactgtattgctactgttgacaaaagtattgcgactacaattgcaatatgactatacattgaaataaagcctttacttatctggtgatgatcaattaattcatctgataagacaacatagcttgcaaacattaatactaaagataaaaacaaaaaagcagcataaactaacggtgtcttactattgaaataacttgtcaaattaacaatagcctcaccaaaggcaataattacgattaaacttactctctctaccaaatgaggaaaatttactcgttcagctttaaacatcccttttaaaaacaatggcaaaataaaaccaacaatataaccacttatacaaaaataaattccaacagggtagccgatgattaatcctacaataattaagataaattccaatcctaaaataattaaaaaggcttgtttatcattattatctgcttttacaaatagatactgacaaaataaaattaagatcataacagccattgcaatattaaaatagtgaaaagtaattcgccattcagtattaatattgttagccagataaactgctacaaacatatttaaaactaaaccgccaatatctaaaaatctgtttttgctatatcggttaaaatagataacttgataaagccaaatttgcattactacaattacaaccaataaaaattgaaaaaaagtaactaaaggaatactgccattaacaggatgatgaatcatcgcagtaattcgagaaattacatacacaaaaactaaatcatagaataattcaaacattccaacaggcttagcgattattttttcaaactattccctcctaatatttgattactgtctatcatgctttatatttgtccaaaaagcaaattatgatattaatttggcaatctcagtttttagcttgattgtaaaaaattatgctaaagtaattattgattaataaattaatttaactggaggaatagccatgccacgaaatcccagaagacacaattttaatcagttctcagaccaagaaaaagataaattaaaaaatatcaaaaaagaattagctgaggcccaaaagaaagagcctgaaagtctacgtgaacatctacaagcctttaatgatggagtgatggcgattatcattacaattattgttttagaaattcaacctgctctgcatgaaattcattatcagcaattcattagcaacattgctgtctttttaatcactttttttattgtggcagacttctggtatgatctacatttatctttttcatactatattttcaaaccttcaaaagcgattgccattctagacttcttttttctagctgatttatcacttctgccagtcatgactaaatggattatggctgaaaattcttctttcgctgtagctaactttggaattgtttttttaattgccaaaatcttagaatatctaattcaatattttggtgctaaaaatactgcggaaactgtcaaatcttttgtgtaaatagttctttctcgtaaattgattttttaattatttatttaatcaaagtaggattctaaggtgtcctgaacctgaccaaagcctttatgaattcgattgaaataacggtcattgtagctcattgcctgaatgccaataaaagcatcaagcgactgttcagttggaaactctgccttaggcttagctttgcgcttgatcacattgttaaatgattcaatcatgttagtcgaataaattgaagctctgatctgcttgggatagttataaaagaccagcagatctggttctatgtctttcaagcttctgataacatggctgtaaaccttgccccatttggtatagaagtcatgcaggacagctgtggcttcttctttgtttgtctgttgatgcacctgtttgaattcgttcatgatcttttcacgatcgtcgacgcgtactttagcgcagatattgcgcatgacatgaaccaaacagcgttgaaaatgagctttaggataagtcctggccaaggctgttttcatgccaacaacaccatcagaaagaaaaagctcaacttgctttaagcctcgggatttcatgttttgaagcatatctgtccagacttcaatgttctcgctaggcgcaatgcagtagtcaatgacctccttgtgcccattaggcttgatgccaatggcaatatagactgcttcacgctcaaatgtttctcggcgcaaaggaaggtatgtcgcatccaaatagacgcagaaaaacttgtcgcttagcttgcgtttgtggtaagcctcaacctttggaatcatctgcttggaaatatttgatacctgggctggactgtaatggctgccatacatcttttcaattagatcggctatttccctggtggtcacgcccttggagtaaagcttgataatcatgctttccaagatatccgagtgctgcttgtagccaggcagcgtgtgctgatgaaattgaccgttgcgatcccgaggcacttgcacttcaattgggccaaattgcgtatcaactttgcggaaataagcaccatttctagagttgccagtattccagccatttctggcatagggatcatagcccagaaaggcagtcaattcagcttctaacaagttattaacagcctgttgtagctctttgcgcaataaatcatttattttgtctggattgaatagagcttgagcaaaatctttggtaaaatcattcatgaaggagttcttctttctgtatgtgtttttttgttcaaaccaatcatacgagaaaggaactcctttttctaatgtttaaagaaataaatttaaggaatcattcatccttacacaaaatattttacagtctcatactgcgcgctattcccaaatcatgcgaattattattagccgctcctttattagaaaaatgacggttactttatttttaaatgtagtattgatcattctgtcattattcaatgccaaactagcaatgattctttatttaatagttccagttatttcatttctttttccagttaaacgcaacaaaattatgtgatttttatttaaaagagcgccagtaaacttaaactaaatctactggcgctcttttgttacttttcttgttccttgcaaacacattctttactatttaccattttgcagtggcaaatgccatccttatctgcacaaggacaatttttctgacatttcattttatcgtgacaaaattcatttttcatgtttatcacctctatagcttattatgcctatgataatcggactttccaaccaatatatcttacaattttacttttcctaataagattattttatagaaatacctagttaatttgttaatttaatctgctgatcagctaccgatgtaatgaagtaaggatcatgctcaattagtaacatcgttggcttcacactcttaagaagcttaattaattgatcttgattgaatacatctaaataatttgctggctcatcccataaatataaattagcaggttctgtcaatgacttagcccaagctactcgtttctgttgtcccatactcattttttcaattctagttgtaaaatcagcacgcgcaaatcccattttcttaagattgctcaacaaagcttcataagacaaatgatattttttagcaaagtcttttaatgatccgctatacattacaaattcttgtggtaaataagagattttcaaactttcaattagctcataattacctttggcaattagattttgagagatacccagtaaatacttaattaatgttgactttccagaaccatttttaccttcaatagcaataatttcatgattattcaaagacaaagtcaagcttttaaatagttctctactattttttagttgcaagctaagatcattaagttgcaaaatctcacgatgataatctgcctgaaaattcatagtcatagtaggaactttttcaatattctttagcattccttctttttctgcaatcctcttatccatgcgattgcgtgcattaatcgatttcttcatcatctttgcagcttgatgtccgatcgctcccttatttaatctgtttttgtttgtaaccgcttaaattaattattgacatttagctagttcagttttacgataaagttgaattaaataaatgttcttcgaggcaaggtgaaattccttaccggcggtgaagtccgcaacccgcgaaagcggtggaatccgataatcggtaccgatagtatagtctagatgatagaagaataataaccaataagtaacgcttatttgcgtttgccttgattatttgactttgaatattattactgaacctcgagaatactcgaggttcttttttgttctacgaggaagtgattttaatggaaaaagataatttttatatgaatttagctttagaagaagctaaaaaaggtcgctatcaaacatggaaaaatcctatggttggtgccgtaatcgttaaaaacggtcaagttttagctactggctatcatcaccattatggacaaaatcatgcagaacgcgatgccatttcaaaattaaccccagaacaattatttaattcaactctctatgtcactcttgagccatgcaaccattatggtaaacagcctccctgctcagatttaattatcaaaagtgggattaaacgtgttgtagttggacaaatcgatccacacaaattagttactggaaaaggaattgccaaactacaagagaatggagttcaagtaactactggtgttttagctgatgacgcaagtaaacttaataagttctacagctatttttaccaatatgggtttccctggatcacagtcaaagaagcaactagtttagataataaagttgcaatgcgcggtcagcgaactccaatcactaatcaagcagtgtatcagcaagtgcattctgaacgtgcagattatcaagcaattatgattggttcttcgactgctatcattgatgaccctattttaagaactaatgtcaaaagtgactatccgccaatccgtattatcattgatcgtcgcggacggctgttaaatcatttacgacttcgcttattaagtgatacaaatcccacttggattttcactcaaaataagcaaatgtctaaaaacaactttactaattctaaaatcaaaattattcatttagcaacaaacaagatccaagaagtatttgattatttgagtacaaaagaaatccagtcagtttatgtagaaggtggccctactttggaaaaagcaattatgaatgaaatttttgttaatgaagtaattaaatatacggcgccgatctttcttggagatgaaggcgtaacaggtttagtaccaaacgaaactgtccctttaacaaatgttaaaaaaacagcctttggcaacaatgaacgaattgcaggtgaattaaaacatgtttagtggtctagttcgcggggatgctcatattaaaaaaattgataaacacaagcaaacaattaagctaaccgtttcgtgccctgcagactttactaatgagctaacggtcggtgattcaattgcaattaatgggacttgtttgacggttgaaagttttactgaaactagttttgttgtaaccatgatgcctcagacttataagaaaactgtttttaagaatttgcataacggtgatcaacttaacgttgagcgttcattagaagtcggtcaacgtttagaaggtcatcttgttacgggacatatcgatgatttggcaacagttactaaaatagcacagaatgaaaatgcaattgaaatttggtttaagtttcctgcccgattatcaacacagatcgtacctcaaggtagtattgctttaaatggcgtttcattaacagtgatggatgttaaagataacagtttttcggtaggtctaattccacatactcaagacgaaactaatttagccaacttacagataaatgatgaagtaaatttggaaaccgacattatcggaaaatatgttgcaaaaaatttagaaaagagaaattaaaatggatgttagaaaaattcaaaatgcaattcaatggatgaaaaatggtggtttagtgattgttgctgatgatgaagatcgtgaatctgaaggtgatatgatcggcttagggtctaaagttactcctgaaaatgttaactttatgaccaaacatgctcgtggcttactttgcacccctgtaagtaaaacaattgcccaacgtttaaatttctaccaaatggaacaaaataatactgatccatacggtacagcttttacaatcagtgttgattacaaaaccaccactacaggtatttctgcttatgatcgtgcggcaactatcaaggcaattgctgatcctacttccaagccagaagacttctttagaccaggtcactgttttccattagtcgctaaagatgatcaaatcaagaatcgtaatggtcacacagaagcctctattgccttagctcatcttgctggcgaaccagaagttgcatatatttgtgaagttatgaaagctgatggccatatggctcgtcgtccccaactgaaagaaattgctaaagaatatcacttaccatttttaacaattgcagaactacaagaatatattaatagtcctgtgagtaaacgctcagagtttgtaaattttcccactaaatatggcaatttcaaaattaaggctttcgccaatgaaaacttagctattattaaaggaaagattgatcctaaaaagccagttttagtacgtcttcattcagaatgccttactggtgatacgtttggctcaatgcgctgcgattgcggtgatcaattacatactgccatgaagcaaatgaataaaaatggtagtggcataattctttatttacgacaagaaggacgtggaattggattaattaacaaattaaaagcttatggtttacaggaccaaggttatgacacttatgaagcaaatgaaattttaggttttaagccagatgaacgaaattatattattgctgccaagattttaaaagatctaggtattagtcatatcaatttgcttactaataatcctgataaaattgatcaactagaaaataacggtattactattgaaaaaagaattcccttggaaattcctgctaataaggtaaatcatgactatttagaaactaaacgagataaattccatcatttattagaagcactatagtgaggaacacagaaatgaatatttatgaaggaaattttaaaaacaataattatcacgttgcaattgtagcatccaagtttaacgaaaccgttacccatcatttagttgacggtgctattgctactttaaagcaatttggagtacttgaagatcagatcgatatctattgggtcccaggtgcttttgaaattggttttactgctaataagcttctcaattcaaataactacgatggtattatgactttaggcgctgtcattaaaggtgagactgatcattacagcatgattattcagaatgttacaaacgcaattatgcagatgaatcttaaagcagaagtcccaataacttttggtattttaaccactgagaatattgatcaagccttgcaacgatccggcttaaaagctggcaatgaaggttcctctactgctcagagtctattagaaatgatttcgctaaataaacaaataaagtaaatcaaaaagtgtctgggaaaaaactagcttccagatgaataaaaacgatcaagatttccttttttaagaatcttgatcgtttttttgttctctttaaaatttttaacaataaaaatcggcccttcagccaccttctttgacaatatttgttcaaattcatcatcataaaggcaattccgatatcggtttcgaccttctctttacctcgcaggtgcgttctgcgcatgccaaatacgttcttcaaatgtccgaaaactggctctacatcatattttctcatgccatagatgtgtctgccttcttcgctttggagaacttcttttgctttttcttttaaatattgccagttaggattatagcgaacttggcgctggcggccgctagctgttttagccaattgttccaattctggcgttagctggaactcgtctgcctcataaaccttaaaatcacggacctgaccagtagaacgatccttgcgctggctgtaatatttgaaattgaatctgacgccatgatgatcaatgtaataatcatctttttcattgtagtaccagttgattagcttagttggatcattcttatactttttggtctgttctttttcatacatagtgtagggaataaagtacttcttgtctggatatttttcctccagcatcgaataattgtattcactgccatagccagcatcggcgacgattttgtcaaacttgtccaacacggtcatttgatccaaaaccggctccaaagttttgaaatctgtcggattaggaaagatggcataatcaactacatattgatcggtcgtgactgcttgaatattgtagccaggctttaattgaccatttttcatgtggtcttccttcatatgcataaaggtggcgtcatgatctgttttggaataactgttgcgtccggcaaagatctcttcggcttcttcatatttttgcattcttggcacataatcttttcttagccggtgcagaatcttttttagtccacgtcgcttggcttttcgaggtgaaccgccaggaatggctttgttttcctgctcaatctctttagtcagcttgttaatttctgcttcagtttcttgagctaattcctttagcccctgactagtttgaactttttctttttccatttctttgactacttctttagtaatcaattcatcataaagttcaactgcctggcctttcagcttttcatgatacttttcaaccgctttgcgccagacaaatgtatagcggttagcatcagcttcaatcttagtaccatcgataaaagcagcaccttcattgattaagccttcatcttctaacaggttagtgaagtagataaagctctttttaatcagttcattggcatggctgcttgatctaaaattattgatagtatgatatgaaatcttttgctggtcagccaagatcatcattggcagattttcttccagcatcaactcaatctttctgccagaaaaaactcttctggagtaagcaaaaagcagtattttgagcatcatggctggatgataggctgggcggcccgttttagcagtcttgcctactaaaacatcttctggaattgaatctacaaaccagctgatgacattagccaaatgattggccggaatggcaaaatctagattaagtgttaaagcagtttgacctgtgatataattcttgtacatgttagtttccaccttttttattttgtgatgatttaataatatcaaggctggagctaaaagtatacaaaaagagcgttgaaacaaaaattcaacgttcttttttcatgatctgagacttagttttttcccagacacttttttgtaatattgaatatgctccttaatagtccaagaatatttaactagtactacgcttttgaattacctagttctgatcatcgttataaccaaaaatagttaggaactgtaagaacaggttgacaaaatctagatataactacaaggcacccagaactgctaagccattggttgaaacttctccaccaaattgtaagtaaatattcttcattctttgtgcatcccaagcggttaaaactgtaaaaataatcactgcaataaacgagaaaatgtaactaaccattgggttctttaagaacaaattaactaacatcgccacaatcaaaccaattaatgcagctgaagcatacgaaccccatctactcaagtcctttttagttaccgtcccgataattgccattgccacgaatacgctagccgaagcaacgaaggccgaagcaatatcttgccctgtataagcgcctgcaataaaggcaaaagtaattccataaataattgccgtaattatcaataaaataaagctggctactggagttcgagttgctctaaagttaatgacaaaggttaatgcgattggtaacaataatagcagccacatcgtccacggatgactaaccattaaggcaaccatctgcctagcaaaaacagtcatcgtaagataggcactcaaggcagaaacaaagacagccagtgccatatagccataaattttacttaaaaagacatttaaaccagatgcatcaactacatgacgacgacctggattttgatcgaactcatccatcagtatttcctccaatctgttagatttctttggttgcttttaatgtatcacttaccgagattaaagagaaatatgacggttcgagatttcttaattcagttttgcgaccaataaattgattcatgatttaaacccttcggtaatcttaattgctatacttaacaaaaaagagctaaagcaaaaatagagtagagggagttttataactcgcccctctcattgcaccggacgtacggttccgtatccggcgctacgtttgtgattatttacgagataaataatattctagcggatcgaccaagcctgggcgatccgctttgcttatgcccaatacttttgggctaagcagaaagttaatgacatgacccgtacttcttttataccaacctaagcgcgtattagctactttatgaatatcttcatcactaaaattgcactttagtgccttgttaatccgcattaagttaatgtatattcgttttggtagtttccattgtttaatgattaccacccgtactttatgacgcagccattgactgaacttaattagaaaatatttcatgtcgccaactctaaagtaattgacccagcctctaactacttgatttatcttagtaaagactagtaatagaggctgagcagctgcttttctgcgacagagaagttctctcatcttgtcataaagcttgattttgcggtcatctcctggctttgcttgccagtattcgccacttttccagaaggtaaagccaagaaagttgctcttggttggtcgtacaactttggttttggttgcgttgacctttaggaatagctttctttctagccatgatgaaattgaattcatcacacgtttggctgatttaccgcttttgacaaagatattgcagtcatcggcatagcggacaaagcgcaggcctctttgttccaattctttatccattttatctaaatagatattggatagaattggtgaaagagggccgccttgtggtacacctagtttattaggcttaacccaaccatcttccattactccagctttaagaaaggctcgaattaaatggagggtggttttgtcatttacttgctctctaattattgaaattaatttatcatgatttaccgtgtcaaagtatttctcaatatccaggtcaacaacccattgatagccttcgtttaaatattccaagacttgttcaatagcgtcatgagcactgcgtccaggtctaaagccatagctatgctcactaaaatgaggatcatagatcttcattaatacttgggcaatagcctgctggattactcggtcaacaaccgtgggtattcctaaaggacgtttcttaccattagctttaggaatgtagactctgcgaacagcttgcggacgatacttcatcttcatgatggcgtcctttatttctacttgatgctttttaaaatagctatcaagctcatcaactgttctcctgtctacaccaggcgctcccttattgattttgactctcctgattgcttccttgagattattttgacttaaaatctgttcaattagttccatctcgtgatatctccatttctacttgtaaatttattcagaattgtcccaattgctttcaccatcaaagagttacgttctctttgtgctaggctatcctcttatccggactgtctgaacattgcttatagcgagatatgctcttacaaacattaggcccttcgctccagtttcattacaaaaccttcagcactactacgacctcagctgacttctcgcgattaacctttttcgaccaggcttacgatcgctgatattaaagcttactcggtttcacctgtccacgagatctctcggggtaagacattcatctttaattttccactgccccctggtttaccgtcttggttttacggttgtcctttggactttaacttgtgctgcagtctcatccaccatttggcctgaccaggtttctgtacgtaggctcggaaaactcgctagccacttccttcacccatagcgtcaccgctaacggcttgtggttcgctacacttggcgacaactacccgtgatctagactttcactagactagacaaatgccatgcccgacacacaacaaaaatagagtcttcactgaagactctattgctttttgaatattaaattaatcagtttctctttctaaaagctgcaagactgaatattcctgcgattgcggcaaacacagccccaatagccgtcaacccagtttgtttttcaccagtttgtggcaaaacattcctttgtgtaactgctttttgaagtttaacttctttaacagataccgcacttaccttagaattggctaacttaactggtatttctttcttagtaaattgacatgatgacactttttcactctttggagcaacagtcttattctttgctactttatttattttactcgttttctttgtcttatttacccgctcagcttttggtggaatatttttttcttgcttgtctatcgtttcaggatgtggagccacattattttctgatggtgcagttggctgagttggagttgtcggttgagtcggagtttctggtacatcaggtgtatcaggctgtggtgcttttactggaaggatgtctacaacatagctattttcaatcttcatatctgattctttagaaccatttaatctataggaaactgtcacaatatatttaccggctggagtttgaccattaattttattaatcttatttctgaaaattgaaagcaccaaaatcaagctcaagtcctgtcactattgagctttcttagacgtaattagtttttatatgatctgtttcagtgcaatttgtatgaatcgtggcagttggttaataaagtcattgattacttcatctatcttttcaaaactattctgtttaagctcttttaattctgaaattaagtagaccaatgcatctacgaatctaatatcaggtaaggattcgttcattagatagaataaatctccgattgtcttatcatctgtattttgtctttcctgccaggtcaatagatcataagttattgctgtaactgcgatatagccacattggccatcatagctttgaacttgagatttatctaaagcaagatattgcttagacgtcttaaaatatgtttcaatttgccatctacgaccataaagttggatgatttcttcagggctaagctttgtctgagtagtagctaaaaccaaatacttgttcttgtttccacggttggagacaaagacgagctttaataaaaagctatgtccatgatattgagcctcaactatgcttgaataaagataatgtttctttttacggatgtttgaagcagccaaacgatcatacaagtctttaacgctatagcggcgatggcgataaatgtaataaatctttgaactcttcttgatcatgccaagtccatctaaaccgatcttctttaaaatccaaaacattcttggagaagaaaaccaagaatcgaataagacgtatttagcttctactcctaatcgtaaggcttgtctaatcaactctacagttacatcattcatctttctctgagcttgatttctccttttaccagaaattgaacgttcatcagcagtaatgggagcagctccaatcatatttttcttggttttggttgacatcaaggcaaagttaaccggcaagaaggtattgccatcgctccagcctaaagttaaaccacgatatccgttcaaatactcatgcttgtcatggtcatagactttagctagcaattcggtctttttagaaaaagaccgagccatcagcgtatcgtcaacgataaaagcaagtcggcgtcttttatcgataaatggttttaagcagccaatgagccgggctgcaatcaagcataatagtttttgccagttgattcttccatcgttaagtacattgcgagcagttctaacggaaaaacgtttgtcatccttagctctgaataaagaaagccgagcaaaatgtactgacatcagccaagagataatcatggttaatgaaacggtggatttacgcttaaaattgacttgtttagttaacttagctagaccaattagattaataaatgaagaaattaaggatttagtatcattttctgtgtcgatttgttctatactgttcattgcgcaggatctcctttactttttaggtcgacacttaaagtataacgcagagagatcctgcgtttttatttttgataagaaaaagccaagaggcgcggggaaggagcgttaatcttagctttcaagtttcagtcttatttcctttttcatcgatgatgccaaccaattgaacatcttgtgcattaactggaatattttctaataagtatccattatagacagcattaggatttcttacattaaatactccagttacaccttgatgataattccagtcttgcgcttctttagatccttggtttaaagtctcatctttagtagcgataatttaatgtacttcaacatagaaaattctcttattctgatcttctttattaagtccatgaataattaccttatgactggtatttgtatcataactataaaatggcattaaagtggttaaatctcttgcctgcggattcactgaatagccatatttatcaattacctgttgaatctttgataattgaatcttatagctaccaccctcataaaaagcttttccacttgtgtccaatatattaccagaattagtaatctgaataacttcaccaacttttggtaaactctcaataagttgtggtatattgacagcatcataactaccatcttgattcctagttaccaaactaattggagtattctgagcttcatcaactgtccaaagcttttttggttgtttatatgtgcgtacataaatactctggtcgttttgagcttttagatctatttcattgaattgatttcctgttggatcaatgatcaagggtacattcatttgcgcagtagtttcaccaggaataactcctctgaacccaatctgtcttacgttactaattgcggcagcgccaaagtttttcatcatttcttcataagaataccaagtaccattttgggccaagtaataaactgacaaagcattatcattaatcaccttaccatttttaataaagactacatttgctgccttagtactactgatttgcaaacttagtttttccttattggaataccatgcattgatcattaaaactgcttcatcattaggattagggttagagtcatttttactattaccaatcatttgatcagttttagaaacattttctagagttaagtgagcctcagggtcttgagcattttgctcaattaaaatggcattattattcttacctgcttctgcacttgaaactacttgagtctgattcgtgttcttgttcttagcggtaatagaataatcatacttaattgagccgtcagccggcacgttagttatattagcatttttaccttgtccatttgtttttagtccactagttgtattattttcaccgagaataattgcttgatcagttttatcctcagagtctaatttctgatacgcagctgatatttctgtcttaattttattttgatattgatcaccatttctttcaaccttttcaacagatgaactattttgagtagattgctgtttagattcaacagttagaacttgttctgacttttctggctgattagcagtagtctcagcagcatgtacttgacttccactaaaacccaaaaaagtcaatccaattaaaactgaagcagttccaatagttaattttctaatcgaatacgtttgtttttgatcaaatttatttttatctaacatttgaatcacccttatgtgaaaaataccgtttctcttttcgccattataataacacccgttgtaagtgccttcaaacattatgcataatttttaccaaacaaaaagcatgaccgaagccatgctttttatcttttatgtatctacttatttttgaactttttctatgatcatccgaataatatttaatataaacatccaagcaatgttataaatccaaatctcacagatcatccatagtgaaatccttggtacaaaccagcccaagtagcatgcacatgcagcaaaaatttgtgtaattacaattgcccagaaaagtattggagctggaaatggtctttcgaagaaccaacgagtttgacgagtaacaaacaatagtaagtgcccaccagcaactaattgcaagaacataattgtctgcaattgtgaaaggtttccaacttggaaaatgctaattgagccaggatttttaactgacatatatcctataaatagaagcaacattgattggattacagcaaatacacccaaaattgatgaagttgtaagaatcttcttcatctgccatctgattggcttcttagaaacataggtattgtcataagcaatagtcatgattggtaaatcatcaagtaatgacataaccacgatcataattgctgttaatggctggaagttcaataaaattgatgacaaaactaccaagaacataatgttcattgtcaaagcaacacgataaattgtgtaacttgtaattctggcaaaaatctttcttgcctctgtgattgcagtttgaataactgacaaaccgggtgaagttaaaattaaggcagcagcacttctagcagcatcagtagctccagcaaccgctgtaccacaatcagcttgcttcaaagcaggtgcatcgttgaccccatcaccagtcatcgctacaatatgaccttgcttttgcaaagttttaacaatcgcatatttatgttctgggaaaactctggcaaaaccatcagcttgcgcaatcaacttttccaaatcggctggaacatgatcaggatcaagattcttaggaaaaactttagtagcgttataaatattagtacccatgcctaactttttagcagtttcaatcgcaatcgcggtgtcatcaccagtaatcatcttgacactgataccttcacgcttacaatcatcaattgttttcttagaatcgtcccgaggtggatcgaacatcgacaatacaccaagaattgtccaagtcttgccttgatccttactttcagctacacctaaggcacgataccctctttttgctaaagcatcagtggtatctagaactttcttttggacatctggatcactacttaatttagctacaacctggggagcacccttaatagcccataattcttctttagtattattattaattaaatgagcttcaattcgcttagatactggatcaaatggaataaacttttccattgtccaatcagctaaaacactctgatctttcaaagctttaataactgcgttgtcaattggatcattatcttctttccttgaagctaaggcgccaattttaattacatcttgagcatctttagcgttaattaaagttgtatcacccaaggttaattgatttttggttaaagtaccagtcttatcactacataagatgtctaccccagccatttcttcaattgaagctagtctagaaacaatcgcctttttcttagataggttcaacgcacctaaagccaacgtaattgaaaagacagttggcattgcgacaggaatagaagcaaccataattaccgctaaaactacggcaacgataattaagaaattaccaatcttaaacattgcttcttgagcaggacttttaccaccagctgaagcaactaatttagcagttttaccaaagaaagtattagagccagttgcaataacaacaccggtcatctcaccttttttaacaatactgccagagtaggcctcatcaccaacttttttagttactggcaaactttcaccagttaaggcagcttgatcaattgaagcgtagtcccaagcgcaaatctgctggtacgatttgccctagccgaattttaacaatatcgcctggaactaatttgcttgcatcaatcgtttcaaatttaccatcacgtaaaactgtagcagttggagctaagcccttcttccacgctgctaacgcatttgacgctttacgagattgccaaaattcaatacaggcattgaacaacagcaatacaataataatgaaaaagtcatcccagtggccaataattgcagaaataattgcagctgcttcaatcatataagcaattggaccagtaaagtcttcaaaaactttagccccattggttcctgcttagcagtaatggcattcggtccgtacttttgcaagcgagcctgagcctcttgagaagtcaaccctttttgtggatcaacttttaacttttttaccacatcttgaatatcatctttttcaagatctgtcttctcttgtttactcattattctgacctctctactttattaaacactcagatctagttttagtataaaactatttcagaataatgtttaagagaaagccttacaaatttgtcattatacgataaaaaaacaattattaaaatatggttattttattttcaagtagctaatgaccttatgaaggcaatctagattccttatttctctgcaaaaattgtttttcagcgagaaattttgcaaaaaacacagccaaaatgtatcactaggtttggttatatattttttctataaaaagatttattttttagcccggatttaaaattgaagtgcaacactaagtgttaaacaaaaaggccatgaagacctaaacttgaagtgacgaaaaatcaagaaaggaagatctttatgaccaattcaaattctagcatttctaagcactatcatcaattaaccagcgtacaacgtggacaaattcaagcaatgctggattccggcataacttcccgtactgttatcgctcaagaagttggctgccataagtcgacaatcagtcgcgaaatcaaacgcggaagcgtcctgcaaagagacagcagctatttattgtatgagcactattacgctgatactgcacagatttattatgagaagcgtcgcaaaaactgctatcagcgcaatccattgaagcattatgctgtctttttgagaatgctctccagacgctttaaagctaaatttgatgccaccagcatcgatgagttcgttggtgaattcaaaaggactatgccaggctacccttgtcccagcacaccaactgtctatcgctatattgatcagggcttgctggacataagcaatattgatctgcctatgaagctcaaaagacgcaggaacaagcgtcatcacagccatggcggtcacgctttgcacaagaagcatcttggcaattccattgaacagcgtcctaaagagattgaagacagaaaagctccgctgcactgggaaggagatctggttaaaggcgtcagacgcaagaatcagcctgctttaatgactttgactgaaagaaccacacgctttgaagtagttatcaagattcctgactatcgggcaagcacatgccaaaggctgcttcaaaaggagattgacagacatcctgcctggtttaaatcaatcacgtttgacaatggctctgagtttgcggatatgaccaagatcaagggctgccagatttactttgctcacccatattctccatgggaaaggggcaccaatgaaaactgcaatggtcttttgcgtcaattcttccctaagggcaagagcatgaaagacaagtcaaaagcttatgttcaacaggcaactgatgccattaaccacaaatatcgccgaatcctccaatatcacacagcagaagaactcttcaagcaatatatttcctcatagcctaactgttgcacttaatttgacaattcagggatttattttttagttattgaatatttaaataatgtttcgatagtctatttacatgctaaacggtcattatgatgctttgatttaaccaattcttatgctaatcatgatcaaaaaattattcatcatcaatgatcaagaccagatcgtgcaaaaaattaattctaaggtcagaaaaggcattcatcatctcaacgttatccttctactaattctctaactatattgtagttacttgcatcatctgaatcagaaatatctgcactagcttttctctcatttttatttactctttattttttgcgcttccaatcttatcttttaaatccaaagctttttcataaataaagaaaccaattacacatgtcaatatatcactaattgcttgagaccaaacaataccgtgatagcccagcgtcatcttcatcaattctagaaccacaaaataaatcacaccttgtctagcgattgccataataaaggcaccccaagcattaccaacagattggaaaacagttgtataaaccaatgcgattcctactacaggcgtagtaacaatcgtagctaacaacatgtaactaccggcactaacaatatccggctgattcatgaataatgctgtgacaggacgggcaaaaacaattaataatccaccaacaattaccgcatatacaacttgaactaaaatatcaaagcgaagaatatctctaagccgccgccaattctgagcaccatagttgtagcctaataaaggttgtgcaccaaaggcaaaaccaacaatcaccaaaatcacaattccatatattttttgtgtaatccccattgcagcgaccttatcagcaccataaattgccagtgacgaattcaataaagccatgccaaagctttgagcaaaattagtaattgatccaggaataccgattgctactacttccttgattgattccgcattaattttaattaacttgggatctagagtaatgaatcttgctttttgcagaatcataattactaaaatcaagtcagttacaacataacctaaaatattggcaattcctactcctgtagcaccccattttaaaacaaataaaaaaattggatctaaaatgatagctaaaatagttcctgtcattgtggcaatcatcgcctcaatcgctaatccctctgttcgaattaagttctgtggaataaagctcagaataataaagactgctccaatggaaagcacacgataaaaatcagctgcatcgttataagttgccgccttggctcctaatatagttaaaataggatgttcaaagattagcaagattactgttaaaaacagaccagtaatcattccaccatacaagcaaaaactgctgattcttttgctgagctcgtattttttctcaccaaataagcgggaaataactgacgaaccacctaagccaaaaatgtcggcaacagctattaaaaaagtaaaaagtggcgcaccgatcgtaattcctgcaactagattagtatcgcctgttttggcaacaaacattgtatctgccagattataaatcatggtagtgatcatacccaagactacaggtagtgctaatttaaaataaacttgcttaattggtgcctttgcaaataaatcttccatttgtttccctcacaagaaaaagcaacctagaagattcttcgggagtcatcctcacgattctaagtcgcttatgttacttgatattcatgtattatatgttaatctaaacaaattctttgattagatgcaatggcgtttttaattcggtaagtgtcattgttttttgtttatagcatcagagaaatctccatctatgctaaactattaccaaaatattgaaggaaaactattatgcaaattaaagaaattatcaaacttaatcaatcaactgagcaagaacttttaaccatctgggaaagcagcgtccgcgccacatataaatttttaaacaatgatgaaatcttacaaatacgcaattatgtaccacaagcgtttaaacaagtggagcatttattaatcattatcgatcatgaacaaattaaaggcttcatgggaattaatggtcaaaaagttgagatactcttcattaatgccaaagcacgcggcaaaggatacggcaggaaattgttgaattatggtatgcaaaagttaaacattgatgaattagctgtcaatgaacaaaatccaaaagcagttggattctatgaacacatgggatttaaagtagtggaacgttcagcaactgatggtcaaagcaatccttatccaattttgaggatgaagttggataaagaaaagtagtaaacagttatatttagttattcctttttcccttgacaaaaatatttttaattttcgagtaatatcatttgtctaacaacccattcttctatattatagaagacgctgctgatacggatgtataacggactgataatcctttccgtaaattgcctgtaagtcagataaggcgaacagcaaggatacctgctgttttctgaatcttggagatattcttatcagagataggtccaaaagactttctgccaggcgatggtagtcaatgtatttcagcgtaaggctttttctgagctggcaagcacaataagttgatgtgaaaatcagcttgcatcagggtttttgacctaatattaaggcggaaaacttaattggaacctcaatgtaatgaccaacaagcttgtttgctgtgacgtatgcgatcaaaagcatgctataacaggtcagaaaagaacgagtagcttaatcggcaagattaaatgatactattaggtacaatatatagaacgcacatcaagtgaaagtttacggtaagcaatccgtttaggacttcggtaggttctttgaacccaacgcaagaaagaagcataaatagctaatctgtgggcggtcttgttatcctatggctgaataaagaaaagaaaagtatgaaaagcatattttcctaacgttggatgcaaaaatgattagttgctaataacaaccagtagcattaattaaaaggagaccggtttgtctatgaagacagctggtctctttttaatattctaattattttactgtattatcacctgacactgtgtgcatccctaagtgactgccatttgtctccttacctacctatgcatgagttgccttaccaccaaagattgaattatcaccgactacagtcttcaaatcacattgatccacttcaatattttcagccaaattatcacctgaagtcgttgccacatcaagatcatcaagaatttggctatctttaatggtaaagtcaccgctaactagcttaatcttaccacgatttagcaataccttctttaatttaatatcacctgaagtttcagttattgcaacttcatctacttttactttcttcaaatgaagatcaccactaagagcagtaaatgttactgtctctaactcaacttgttttacaacagtgtcaccactagtcaacttcaaagtagcgttaactaatttatgttctaccggcactgtaacttttaatgcaacaatatcatcttgactcacaatactgatttcaacatgctttcttttccagaatttaccattcttgcgttcaaccttaggttcttttaattcaagagttttacccgcattagtcacaatcggcctcttatcttctggaccgtggtaatgtacctcgaactgatcgccgccaaccaatgtaaaatcaatatctactaaatccacgctcaatttgtcaaagctatcattgcttaaaactttatcaacaattttcacttcattgtcttcatttttgtcaaaaaacattttctttctcctcatttttaccttttagctattattcttatttttctttaagtttactatcatattgctatttttcaaccgtaatttactaagtggtcaaaatttgcggctgaaatgcaaaaatagacaacttaagttttaacttaagtcgtctatccttcatcctaaaattttctttttcaattcgtctaaacgatcaattttaaacgtgaacgcctgtatccctaattcacttgcagctttggtattattttccaaatcatcaacaaataaacattcttctggctttaaatcatatcgttttaacaaacattgataaatctgcttatcaggcttcatcattttttcctgtgcagaaaagacaaaaccatcaaaataatcacccatcgaagaatttttaacaaagttagcaaattccatccctgtattagacaaggcgtagatatgatagccttgctttcttagttgatccataaaacgaaaaacaggttcatagaaatctacattttcaggccaagttgtcataatttgcttaaccttcttctgcagctcaacaggtacgcgactaataaaaatcttagtcgcctctttttcatcgatttttcctgcatcaatttcagaccattcttttgattcaaaaatcgtttttctcaataaatcatgttcttctgatgttaattgataatgatataaaatttcatcaggattgtaattcataatgacgttgccaaaatcaaaaataatattttttaacataaaatgtcccttctaatacttttaattcacatcttaattttatgctttcttgtatcactgcgaaagaaaaataaaaattgactttttctttttatcaaataaacacaggataagtgaagtcattaaatcttttagccaagagcattgtaatagacacataatacagtataatgattattatcaattacataaaaaggatgatgattttgaataaaaaagcattcagcctagacggcaatcaattaaaaactttagcagttgtgtttatgatctttgatcatatctacagctatcttctattggatattctaccaaattggtgcagtttaattgctcgcttcgttgctccacttttcgttttcatgttaattgttccccatgaccctggcattgcatatactgcataaaagtcattgccagtaaacttttcaagatgcgttttgtctttgccaaattcatccttacctgtctcagtagcattttgatattttacaaaagtatcttttagactatttgcatcaatcttcaatttattagctagttcaacaattgaattggcatgtacatatacttggggattttcttctactttatctagtttttccttaaatgatgaatccatttttttgccatcataaatcaaataatacttttcacttccatgcttgtacatttccgttcttaaattcaagaaattatatggtgcctcattagaaaaacgtttgccattctcatcaattaacattgtttttgaataatcaggtacagtattccaagtgataaataattgtggggcaaaatcaatcgttccattcttataaacatcattatttgaaaactctgcattaacagctttcagtaaactataaccatcaccagtattggcaggactagcttcgttaaagacatgaaccttagcaacagatggtgtgaccttattaagaagatcatccttttcataagaagcaccgcctgtggcaattactacagctttagcactaatagtaaattcacctgctgaatttctcacttgcaaccctgatactttggttccatcatctattatttttgtaacccgactgttcaaataaaacccgccgccatgttctttaatgtaattagccagcatttctactaaatgtgcgccattagtgaaattagcaataataattggactatcagaaaaaatacttacttgcgaatttgttaaggctactaaatcatcgaatgtttttccagactcttctaacaattgttttaagaattttcgatcgtgctccttagttgcatttttattaacatgatcgacaaagttcaataaccttatcattgtcggtagctataattacagtcgcattattaatttgctgctttaatccttcttcactcgggtaaacaccccaatgctagtcgggactataatcatccgttttttgatcaagacaaacttgtttgtaaaaagcacaaacttggcttaaatcttgaacagtagcagttcttatttgcaaaaaaatcccccttctattctatagttttcgattataacaaaaatgcatccccttcccaagtaggatgtggacgcattcatttaatctatattttattcatcaatcttaggggccttgccgatttgagcttgcatcatccagattctcttttcaatatctgtatggcatgacgttaagatatcatttgagccatagtcgccttcctcgtcacttaccttgatcccttcttcataaaggtgctccaaataacgataatcagcaatgatagtcgcaaatctttctctagttgaaattccccattcaccaggatgagcttcgatcttagtatgatcaagcacttcctgtaagcttgaatatggtgacccatcaattgtaatcaatctttcagagatcaagtcacgttgttcatcaagttcatccattacctcgtctaaatatgggtgcaattttaaaaattcaggtccacgcatataccaatgttgttggcggacaaccatcattaattgagtagtatcagcaacagcttgatttaatatttctttggttttaggatacttcataaattagccctctttcaattagtaacttactttatataactattatatattttgttatcgcttttatcaaattatatgttttatgtaataaaaaatgtgcccgaacaagcacatttttaagtaagtttaaaagaaaattttactcataataatcatgaataccaacaaacaagttgagctaactgcggcagccccaaagactgaaccgccacgcttaaagattaccttgaagttaacggaaattcccaatgcagccattgccatccctaaaaagacatatgctgcttgcactaagaagtctaaagtccgcgcagacattggtaaaaatgtaccaataatactagttaagataaatccacccaagaaccaaggaattggtaatttcttcggtgctctagtatgttctgcttcactttccgtaaccaaacgcttttggtaccaatagcccacaattaaagcaaccggtgctaaaagtaatacacgagataacttcataattagagcgctatccaaactgacttcaccaaaagcacttcccgctgcaaccgcatgagcaatttcgtgtaaagatccacccgctactaccccatattgtgtatcagttaagccaagaagcggtttgagcacgatttcaagtaatgtaaacaccgttcccatgacacaaacaacagccaccgctagaacttcgttttctctttttctgtcttcatcgcttgtctcaatttgtggtgacacgcccataacggcagctgcaccacaaactccacaaccacaagccgacaaaatagctaactcatcttcagcaccaaacttacggctaagccaataagtaagcacaattgttccactaactgccagcgccgcaaccagtatagtcttaactcctgcatcagccaacttagtcaaattgagtctaaatcctaacaagataatccctaatcttaaaaacttgttggaaataaaacccatgccagctttcgcttcagcttgtacgctctgaggcgttatttgcagtgcaatccctaataacaatgcaattaccaatgccccgattaagtttacgtatggcaatttagccaagaaaattcctgctacagaacaaaataaggtcatcgccgtagctaaccagaatgatttagttttaattatgtttgtcaacaaaaatccctccatatgtgatctgtttaatttgacaaacacaactccctttatgatgattgtaataagtatactattattttctattcttgacaaggcaaattattaataaattcacattaactaaaaataaaatattttggcattatttagttaagtaggttataatacttttgttacggagtgttggcagagtggtaatgcaccggactcgaaatccggcgaaccaagttttccttggcgcgcaggttcaaatcctgtacactccttttgtcaatatgtggaaaagaccaagtgcaatgcttggtcttttttatcttagtcatttttaatatttaaatgctacacttgctaatagcacattatttaaagatatagaaaagagattatatattatgtgtacttcaattattttcagtccacaagatcactattttggacgtaacctcgatcttgagattactttcggccaacaagttgtagttaccccacgcaattatgctttcaacttccgcaagatgcctgaaatgaagcatcattatgctatggttggtattgcacttgatgctggtaattatccgctctactttgacgcagctaatgaaaaaggtttaggcatggcaggacttaactaccctgacaatgctacctactatgatgaagttgccaataaagacaacattgcttcatttgaatttattccctggattctgggtcaatgcgcaactgtagcggatgctaaggtattacttaaaaagatcaacattgttaaccttaatttctctgacaagatgcaggcatccccacttcattggttaattgccgataagacaggtgtttcaattgtcgttgaaaccgataaagatggaatgcacgtttatgataatcctgtcggttgcctgactaacaatcctcagttttcatgtcaattatttaatttaaataattatgctgatgtttcacctgcaatgcctaagaacaacttttcaaaagaggtcaatatgaatggctacagccgtgggcttggttcacgcaatttgccaggtgggatggattcagaatcgcgctttgttcgtgtagcttttaacaagttcaacgctcctgttggtaaaagtgaggaagaaaacgtagacaattacttccatattttgcattctgttgaacaacaaaagggacttgatcaagttggccctaattcatttgaatacactatttactctgatggtaccaaccttgacaaggggattttctattacactacttatacttgtcagcaaattaatgtcgttgacataaacaaagaagacctcgatgctaaggaattaatcaagtatgatatgttaactaagccaacatttaatcaccaaaactaaataattgaaaaataatgttaattttattcccggatttaaaattgaagtgcaacactaagtgttaaacaaaaaggccatgaagacctaaacttgaagtgacgaaaaatcaagaaaggaagatcttcatgaccaattcaaattctagcatttctaagcactatcatcaattaaccagcgtacaacgtggacaaattcaagcaatgctggattccggcataacttcccgtactgttatcgctcaagaagttggctgccataagtcgacaatcagtcgcgaaatcaaacgcggaagcgtcctgcaaagagacagcagctatttattgtatgagcactattacgctgatactgcacagatttattatgagaagcgtcgcaaaaactgctatcagcgcaatccattgaagcattatgctgtctttttgagaatgctctccagacgctttaaagctaaatttgatgccaccagcatcgatgagttcgttggtgaattcaaaaggactatgccaggctacccttgtcccagcacaccaaccgtctatcgctatattgatcagggcttgctggacataagcaatattgatctgcctatgaagctcaaaagacgcaggaacaagcgtcatcacagccatggcggtcacgctttgcacaagaagcatcttggcaattccattgaacagcgtcctaaggaggttgaagacagaaaagctccgctgcactgggaaggagatctggttaaaggcgtcagacgcaagaatcagcctgctttaatgactttgactgaaagaaccacacgctttgaagtagttatcaagattcctgactatcgggcaagcacatgccaaaggctgcttcaaaatgagattgacagacatcctgcctggtttaaatcaatcacgtttgacaatggctctgagtttgcggatatgaccaagatcaagggctgccagatttactttgctcacccatattctccatgggaaaggggcaccaatgagaactgcaatggtcttttgcgtcaattcttccctaagagcaagagcatgaaagacaagtcaaaagcttatgttcaacaggcaactgatgccattaaccacaaatatcgccgaatcctccaatatcacacagcagaggaactcttcaagcaatatatctcttcataacctaactgttgcacttaatttgacaattcaggtgttaattttatttaaagattagcattatttttgtttttccggttaaaatagattgtacttatatagtaattggggattttcttattaatgaataattattttgtactgctactgtctgcggcagttttgctctggcttatttttaatatcaaaaattcacgtcgtttcaatctatttgatcactggcttcaccaccaattggtcaaacgtcatgattgctacagctggcaggttatcgcttttattaatgatcctaaactaatggtcgtttgggatgtattattagcaggcctacttttaaacgaagaacgaaatctaaccgctctttgggtattaggaactctaggatttgctgacatttctggtattattctaaaaaaacttattcggcgcaagcgaccattattacattccgataaagaagatggctatagctttcccagcggtcatgttttaggtgccacaaccatgggcttaatcgtactacaactatttgccaaagatcttggaaccggatttgttattgccgtagtagctatttgggcaatggtaattttctctcgtttaagtttaaaggcccactatccttctgatgttcttggtgctactagtttagcaatcgtttgtttcagtatttcgcagcaactatttttagcgatttaaaaaggatcacgttcagcacttgagcgtgatccttattttttattcatgaaagcctaccataatgccgccttcttcagcatagaaactacataaagcacgcattggacgaatagtaatttgagcttcagggtattcctccaatattttatttttaattatttctgcatctttttcattttcgcaatgatcgattatcacttcgccaccgtgataattatcttccttcatatacttaataatttcacggatggcctttttcattccacgagccttagtaagtggctcaagttttccttctttacttgctgttccgatcaagttgattttgagcaaacctgcgattttggctacagctggtgaaacacgaccgtttaaagataaattatgtagtgattgcaaaacaaaaagcaaatgagtctgcattctaaacttagcaattgcttcttctagatctacaaagcgcatttcaccttgcagcattttctcaataccatggactatgattgctagctcaggtcccgcacttcttgaatcaactactataattttgctcaagggatgtttttcctcatacattgcttttgcctgaagggctgaagaaaaagtgccactcatcccgctggtcattgtgacgataatcgctttttctgttccttcaagtgcgtcaagccatgcttgaatacttggacaagttgttttgcctgccacattattttggttcatattggacaaaaattccttcatattcaaatcttgattatcaaggtagtcctcaccaccaaaagaaattgtcagaggcactacttccaaattacgcgccggatcattattcatattggcacttgagtcaacaattaatttaatattttccattttagattccttattttttgtatttattttaatacatatattatagtcctttgatatagagttttttaggctgctttactaatttttaaaatgtaaaccgctttcatatgtttacaccgtcacaaagttaggctaaaatttgagatgtaaagcggagcaaaaattgttccgtatggtatgaaaaacataccataatttttgaggaggtttattaatgctcaaatcagttattgaaaatgtacacgcacttgaaattttcgactcacgtggtaacccaactgttgaagttcacgttactctttcaaacggtgtcgtaggtaaggctgaagttccatcaggtgcttcaactggtgaaaacgaagctgttgaattacgtgacggtggttcacgtcttggtggtaagggtgtttcaaaggctgttaacaacgttaacactgaaattaacgatgctcttaagggtatggacccatacaaccaaccaaagattgacaagaccatgattgacttagacggtactccaaacaagggtcgtcttggtgccaacgctatcttaggtgtatctatggctgttgcagttgcagctgctaacgatgctcaccttccattgtacagataccttggcggtactgatcttgaaatgccacaaactttccacaacgttatcaacggtggtgaacacgctgacaacggtatcgacattcaagaattcatgatcactccagttgctaagacttcattccgtgacggtttcgaaaagatcgttaacgtataccacaccttgaagaaggttcttgaagacatgggttacgaaactggtttaggtgacgaaggtggtttcgctcctaacatgaagaactcagaagaagctttgaaggctcttcacgaatcaatcatcaaggctggttacaagccaggtgaagatatcgctattgcatgtgactgtgctgcttcatacttctacaacaaggatgatcacaagtaccaccttgaaggtaaggttcttactgatgaagaattagcagattactacgacaagcttttggacgaattcccagaattaatttctatggaagacccatacgacgaaaacgatgttgacggtatggttaagttcactaagagccacaaggaccgtatccaaatcgttcttgacgacttcatttgtactaaccctgcacttttgactaaggctatcaaggaaggtgctggtaacgcttcacttatcaagttgaaccaaatcggtactgttactgaaacccttgaaactatccgtctttcacgtaagaacggttacaacactatgatttctcaccgttcaggtgaaactggtgacaccttcatcgctgacttagctgttgctgttaacggtggtcaacttaagaccggtgctccagctcgttcagaacgtgttgaaaagtacaaccgcttacttgaaatcgaagaagaacttggcgaaggcgaacgtcttgcattcttcccagacgatgttgaccacgattaatttcgagttaaccgagtacaatttcaaaaaaagcatgagaattaattttctcatgcttttttgttgcgcttttacatatttattttatcaatttgctaaaagccttatttaaagtgcgatccttaactacttttaccataattggattttcgtttttagattgatcaagcaagataattggatttttatccttcaaacagaacaagtaagtattatgccacgatttaaaatcatcattagcaatggcaagcacattatagtcatattttgttttgccaattggactgtagccgatctcaattgtttttttatttagaataaatcgattagtagtcaatactttggggtaagttgcaccctttttagtctttaaactcttttttccatcatagaattgataagtttgccctgacttttcaccccagttattaactttcctttttagtttaacagttttagcggcatcccagattctagttgctttttctttatctttcctcttatctggcttagccttctgtttaggcttaacttgttttttgtctgaaaattgcttttttactggttttgttttctttttagcaacccggatttaaaattgaagtgcaacactaagtgttaaacaaaaaggccatgaagacctaaacttgaagtgacgaaaaatcaagaaaggaagatcttcatgaccaattcaaattctagcatttctaagcactatcatcaattaaccagcgtacaacgtggacaaattcaagcaatgctggattccggcataacttcccgtactgttatcgctcaagaagttggctgccataagtcgacaatcagtcgcgaaatcaaacgcggaagcgtcctgcaaagagacagcagctatttattgtatgagcactattacgctgatactgcacagatttattatgagaagcgtcgcaaaaactgctatcagcgcaatccattgaagcattatgctgtctttttgagaatgctctccagacgctttaaagctaaatttgatgccaccagcatcgatgagttcgttggtgaattcaaaaggactatgccaggctacccttgtcccagcacaccaaccgtctatcgctatattgatcagggcttgctggacataagcaatattgatctgcctatgaagctcaaaagacgcaggaacaagcgtcatcacagccatggcggtcacgctttgcacaagaagcatcttggcaattccattgaacagcgtcctaaggaggttgaagacagaaaagctccgctgcactgggaaggagatctggttaaaggcgtcagacgcaagaatcagcctgctttaatgactttgactgaaagaaccacacgctttgaagtagttatcaagattcctgactatcgggcaagcacatgccaaaggctgcttcaaaaggagattgacagacatcctgcctggtttaaatcaatcacgtttgacaatggctctgagtttgcggatatgaccaagatcaagggctgccagatttactttgctcacccatattctccatgggaaaggggcaccaatgagaactgcaatggtcttttgcgtcaattcttccctaagggcaagagcatgaaagacaagtcaaaagcttatgttcaacaggcaactgatgccattaaccacaaatatcgccgaatcctccaatatcacacagcagaggaactcttcaagcaatatatctcttcataacctaactgttgcacttaatttgacaattcaggtctttttagcaactgttgttttcttagctttttttacttcaccaatagttactgcatctttaccgaaataaacttgactacaaccagttaaagtcgttgctaaggtaattgcagcgagtcctattaaaatttttctattcataattgctccatttattatttcttataatattattgcataaaatagtctcattaaactttaggcaaaaaaatagagctaattttccaattagctcgcggttttttaataaatggtgacttgataacgattggaacgatctgtttcttctggtttttcagcaatcttcccaactggcactataacactcgtttgaaaggcaggatcaatgcctaattctttttgcaattcaccggcatcatttaacctaactgcaccgcccatgacataaactgaacctaatcctaagtctgttgctgccagcataatattttctgctgcacaagatgcgtctcgttcaccaaacatgctatcttttttggtattaattacaaacaataccggtgcattgtagcaagcattatcagttttttctttgatcttattgcgtaatccttcatccttaaccacaactagattcatcacatctgtttgattcatcccacaaggtgcagtttgaaaagcgacaatcaagttcttaagatcatcatctgaaatactttctttactaaaatctctaactgctcttcgattagtaaaaattgaatttaccatatatgcctccgcatttactttacatacgcgtggtgctagttaaatcgttttagttaataaaaaagtccaattagactagactcaagttgtaagtaatttaaatagaaaagagtctgatctaattgaactatctcaagcttaatcgtttttctcaccatttacaagttagttttaatcggttaaatgtgatttgtcgctcgctgtataagctttatgcgcctgatggacttaaacatcgtaaaaatgttgatcagaccaagcttcctgatagttctatcttagcgatgctcatttggcaaactgaaattggaattgaatctcaacgaagattctgtaaattcttcgttggcttatctcattctcgttttaaccgtcgagctcgaatgctcttgcctctaattcgttgtatccgtcagggttggaatcaggaagtaaaggtaggtggagaattattgattatcgacagttttccgattccagtttgtcagcctgttcgcaattatcacgttaagatcttccgtggcatagccgatattggttataaagcgacgaaaaaaatctactattatggcttcaaagtccacgcaatagtgagtgatgatggctatctgcttgactacgcagttactaaggcgtcggtacatgatgcaaaagagacggtagaattgatgatcaatgctcatccaattaaccattatcttttaggagatgaaggctatttaggaaaagacttagcagccaagctaaagcgtatgggatacgtgctttggacaccatatcgtaaaaacatgaggggtgctaaaaagcataatgatcatcagttaatggcaattagaagaacaatcgaaagcgacttttctttgcttagctattacaatgctgagaataatcgagccaggagcttagtaggttttcaacaacggctagaaatagctattttagcttataatatggcatattgtctagaacgatttaactagcaccacgcgtacatttaatttcttttgttaatcaagcagaaattaccggcccgatcttaggcattgttggtaaaaaattaaatagcaataatccctactttacagatggcgtcaatgttaatttcgcgcaaattttagataaaaataaactttttgtccgcacttacgaacggggcgttggttttaccaatgcctgtggtactggaatgtccgcgacttctcttgctcttactttaacccaccccgaaataggcaacttaaatacaccaatatcagtttataatcctggcggtatggttaaaactatcgtgcattatgaaaaaaatagttattggatcgagcttattggtaacgctacttttactcatcgaattaagctttctgaagctgacttaaggaaaggtgatttttccaatgtccagatccaaaagactgctgaacaaagtgcttatgaaaaatttattgctaatctgccaaagttcaatgacattacaactttagcgtaaaaaaatggcttgcaacacgcaagccatttttactttttaattattaatctaagtctttcaagccatgctttttcttggaaacgcgataagctactaaaccaaagaaaattggaccaaagcttgtccaaaaagcagttgcatatctatgctccaaaactggttgcaaaaccgtaaatataattccggtgcaaacaatcagctcaacaaagactactaacgcaaccgtccatttatagttagtaaacactctaaacttgcgcggataatcttttttaagaaagaatggaaatgcaccgatcaagaaaatataaggtgcagtagcggctacgttacccatatccgtcagaatttgataaaagctagtcgctgcgctaccaccgaatgagaccaccgcaattaataggcaaacgaagacagtttgagcccacatcgcattagcaggaataccgtgtttatttaatttagtcgctgccttaggccataaacgtggatcagatcccatgatgaaggatttaattggtgaataaagcaaaacaaagagagcacctgtcattcccatcaaaccagataaagcaattgctctagtaaagaatttaccaatcaataaactcgtgttaggatccaaatgaagtgcggttccaaaggctttgccaagtgtgccatatacggtatacgtaatatttccagtattggcattggctgctaaaatatctttttgataattaactgaaaagccggtcataaaaatcatcaaaacataagaaataatagtgaacaatgacccaataattaagcctttagggaaatctttttctgggtgtttcatactgtcaatcacaccaccgacggtttccatcccaccatatgcaaagactgcataaactacgaaagaaataatcgtaattggcgtttgaaaacttttattaggcgaaataataaaactttgccacccagtaatcggctgagccaattgcccatgattcataatcaagaccgttaaactagctagaataaagactgcattcattacaatcatgaaccaaccaccgattgatgacataattttaattccagttatccctctggaagacaggtacgttgatacaatcatgaataaaattgctagtacacctatcaattgagtaccatgcaagcccaaaatattccattcttgagttgtatctttgccaaaaataagggcagagattgaaatccaaagccttgaggcgcttgcaaccagccacagcacccagttagccagccatacaaaagtcccaataaaggcctatttttgtccaactgagccagctaaccatgaataaataccaccttgagcatcatgaaaagcagacccatattctgccatcattaagccagctgggaaaaagaaacagacgccagccaaaataaaccaaatgatcccagcatatgtcatttgctcataagaaacagaaacattgccaaaaccataaaccgttgtgataatcatcaacacaaggctcatagtcgtcaatgattttttagtttgtgaattttcatcatccaagataaagcctctactttctatttacactttccattttagcatcgtttatcttgaataaatttattctaattttaggctcataagaaaaaactactagttattcactagtagcccttcatttttattcattaattcttttttcaatccaattacttaattcagttacatgtaatttagtgaccgaactaaaagtcaaaacggtgacatgatcatagttgagattcaactttttctttaagcctgacatcaccttattagtttgactcttttttattttatccatcttggtacaaactaccaaaattgggatatttagatattgagcataatcatacatagcaatatcatctttggttggttcatgacgactatctactaagataattagtccctttaggttgggtctagtttctaaataatcttgaatcatttcgccaaattcttgccgcttcttctgtgaaactttggcatagccataacctggtacatcaaccaaataaaatttttcattgactttgtagaaattcaaagtttgtgtctttccaggctgtgacgaggtcctagctaagtttttacgctttaatagggtatttatcaagctggactttcccacgtttgagcggcctgctaatgcgatctcaggcaagttatctttaggatattgatcttctctaacagcactaactgcataactactgctttcaatgatcattgacacttacctgttctttattatcagtatttttgcggattacctttggcttagcgtgcttagtaattacgtccttagttacttcaacggtctcaatatcctcttcactaggagtttcatacataatatccataattgaattttcgataattgttctaagtccacgtgcacccatatttctttggattgctaagtcagcaattgccttcagagcaccatcagtaaacttcaaattaacatcatcaagtgataacaacttcttatactgcttaactaaagcattctttggttcagttagcactctgaccaaatccttactactcaatttatcaagcgtagtaataattggaattctaccaatgaattcaggaatcattccaaatttaactaagtcagctgtagtcaaatggcgtgtccaatcatctgcattaattttatctgcctcattttcagcaccaaagccaatggtctttttacctaaacgatttttaacgatttgttcaattccgtcgaatgccccaccaacaataaatagaatgttagtcgtgtccatcttaatcatttcttgttgagggtgtttacgcccaccttgaggtggaacagaggcaattgtaccttccaagatctttaataatgattgctgtacaccttcacctgaaacatcacgcgtaattgagacattctcagattttttagaaattttatcaatttcatcaatataaataatgccacgctgtgcacgttccaaatcataatcagcattttgtagtaacttaagcaaaatattttcaacgtcttcaccaacataccctgcttcagtcaaggtagttgcatcggcaattgcaaatgggacatttaaaatacgagccaaagtctgagcaagatatgtcttacctgatccagttggtccgatcattgcaatatttgatttttgtaattcagttgaagaatcaacatccatttggctaattctcttatagtgattatatacagcaactgataagacttttttagcacggtcttgaccaataacatattgatcaagttccttttttatttcaacaggcttaggtaattcacgagctgctttaagtgaatctgctcgtaattcatcgtcaataatttttttagccaagtcaacacattcattacaaatatatacaccgttaccggcaatcattttcttaacttggtcttgagttttgccacaaaaagcgcatttaatctcttcttgatctgtaaactgatttgccattatttttcctcctatatctaccaaaaatcagattatcataaattaactaatattgataaatattaagctcgaacagcaaaaaaagcggcctatagccgctctttttgagaaattagcaaatattactattacttgctttccttcttgtcatcgtcttctttgttttcaagctttgacttagcaacttgcttagcattatcagtaataagatccatagccttacgtacagtaatgtcgtggcctaacatgtcatctgataaggtgttacgtaccatcttttcatccatgttgtattctgaagcaagatccttgatttctttatcaatttcttccttagttgccttaaggtcttcagcagcaacaatagcttcaagaactaagttagttttaactctttcagctgcattcttttcaaattgtgaacgcaattgttgttcgttggtattagtcaacttgtagtaagtttgtgggtcaataccttgacgttgcatattacccaagtattggttcaattgagtatcaacatcttcttgaatcatagcatcaggaatttcatcgatagtagcgttgcttacagcaccttcaattgcagcttcttgaatagcgtcgtttgcttgttgttccttttgttccttcaagtccttcttgatcttttcctttaagtcatcaagggtgtctacagagtcatcaacgtccttagcaaattcatcgtctaacttaggaagttgctttgacttaacttcgtgaatcttagttgcaaagtgtgcttctttaccagctaaatcctttgcaccgtaatcttcagggaaagttacaactacatcaacatcatcgccggcttcatggccttcaagttgatcttcaaagccaggaataaatgcacctgaacctaattcaagtgagtagttttcagctgagccgccttcgaatggcttgtcgtcgatagtacccttgtaatcgatagtaacagtatcgcccttttcagccttacccttcttaagaacaagttctgcattttgttcacggcgcttgtcaagttcagcatcaatgtccttttggtaaacacgagtgttttgcttaagaacttcgatacccttgtagtcacctaacttaacttctggttctacagtaacagtagccttcatagtccaatccttgtccttatccattgatacaggaacaatttgtggttggccaactgctttaatacctgcttctttaacagcagcagaatatgcatttggtaatacaatatttaaggcatcttcatataatgcttcttcaccgtaatattgatcaaagatcacacgtgatacgtgaccctttctaaagccaggaacacgcaagtttttctttactcttctaaaagcttggtctaaacctaatttaatttcatcttgtgaaatatcaaaagtaagatcaccggttgtcttaccggtcttttcccatttaacagacattaattaaatacctccaatgtcaaatttgagtttgcatcttgcatactaagttatcttaccttaaaaggccgcaaaaaacaaatttaaaagaaaaaagatgcgctcctgtgaagaagtgcatctttttttaactatatcgttagaaattagtcaaggatttcagtaacctgaccggcaccaacggtacgaccaccttcacggatggtgaacttagtacccttttcgatggcagctggcttgattaacttaacagtaaattcagtgttatcaccaggcataaccatttcagtaccttctggcaattcaatttcaccagtaatatcagtggtgtggaagtagaattgtggacggtagtctgagaagaatggggtgtgacggccgccttcttccttcttcaagatataaacttgacccttgaattccttgtgggtttgaattgagcctggagcagccaatacttgaccacgaacaacttggtcacggtcaataccacgaagcaatacaccaacgttatcgccggcttcacctaagtcaagagtcttgtggaacatttccaaaccagtaacaactgacttaagaaccttgtctaccaaaccaacgatttcaacttcgtcaccgaccttaacagtaccacggtcaatacgacctgaagcaacagtaccacgaccagtgatagtaaatacgtcttcaactggcattaagaatggcttgtcagtttgacgttctggagttgggatgtattcgtcaacgatgtccatcaacttaagaatttgttcttgagcttccttgtcgccttgtaaagccttcaaagctgaaccacgaacaactggaatatcgtcaccagggtaatcgtattcagtcaacaagtcacgaacttccatttcaactaagtcgatcaattctgggtcgtcaactaaatcacacttgtttaagaaaacaacgatgtagttaacaccaacttgacgagcaagcaaaatgtgttcacgagtttgtggcataggaccatcagttgcagcaacaactaagatagcaccatccatttgtgcagcaccggtaatcatgttcttgatgtagtcggcgtggcctggagcgtccatgtgagcgtagtgacgattttcagtttcgtattctacgtgggcggtattaatagtaataccacgttccttttcttctggtgcagcatcgatttgtgagtaatcttcagccttagccaaacccttgtcagccaaaacagtagtaatagccgcagttaaagtggtcttaccgtggtcaacgtgaccgatagtaccaatgtttacgtgtggcttagttctaacgtaatgttctttttctgccattaaaatgaccctcctgtaaatttgcaagaagtccgttgagataagttaacggataattctctgttgaatattgtactactttcttcggcaaatgcctagtaaaaaagcttaagcgaaattgcctaacgaaaatatcctttgctaattatactaaatagtttgaaaatgtaaaccttttttacttattttttattgcggtaagtatttatatattttttctagtaatttttgatgactacggccatcttttctttgtaaaaatgagactaaatcactagcaaaactgtcaggctcatcaatatattggttaattttagggtaaagactgcctaataccaaattcacttctcccagcattaatggcaactgacttggactattgtgaaatttgcttccaatgctagaaataatttcacggtacttaggttctttttctagaagcagtgtattcgccggaataaagctctccatctggcctattacccaaatttcaaacttttcttcaagtcccaagcgaactaagtcttcacaaagtgacaacctaacagcaaaatctggcgttggatctaataagacgcttcgtgcaaaagctttaaaattaggcaggtttaacttatgtaaactttcataatccgactgagtaacctgttctcgttgtttaaagttttgcataatctgccgctgtttttcttcagaagctggttttaccttttctgataagtccaccccaacaagattttttagttgtagagcttcaataaaaaaattatttttagctagaatttgacagtaacttttaaatactcgctgatcagaaaaaagatcaggctcctctttaattaaagcatatgcctgatcttcttgtttattagcgcaatagagtttgcagagtttcaaaataacgtccaatgaatgctcttcacgtaatgcttcttctagattttgaatagctgcttcgagatctcccttacgctcatcttcttcagcaagtttcaataaattttgttggcttactgatgtcatttttagtctttcttattactttcttttttcttatttatttttttattttcgtctttggcatggttcttattgtcattttgtgctttttcattgcgtttctgcatagcacgatgacggttttgatttacttccatgaccacgggcaagatcactggacgacggttagttttcttgtataaaaacttctccaaatcaccgcggatatcttgcttcaattcagtccaatcaaactttttgtgttcaaaattggcctgaattgcttttttaattacatcaattgaatcactcatcaactggcgattagccttgatatagacgaaaccacgactagtgacttttggctctgcaataatctttttcttcttacggtcaattgtaacaaccgcaataaagattccgtcatctgataggacctcacgatcacgtagcacaatattaccaacatcaccaacaccagaaccgtcgatcatggtatcttcacctggtactgggtcagttaagaagaaacgcttctgcttaaagtcatattcaagacagtcaccattcttggtaatataaatatctttaggattcattccagctttaatagccaaatcacgtactacttcaagtaaacgatattcaccaattactggaattaagaattttggcttcaaggttgtaatcaaaagttgcagatcacgaccagttgcatgcccactagtatgtatatttctgcctaactggataaccgtaccgccagccttatataccaaatcactggtttcagctaccatcgtttcaaccgcatgtgacggagtagttgcaataaagaccaaatcgcccttatgaatcgtaatcatactatgacgcttcttagccattttttgtaatgagttaagtggttcacccatacgcccagtctctaatataactgtctgctcatctggcacagtcttcagatccttaactcgcatcaacaagccttcaggcacatctaaatagcctaatttcattgaagttctaacaatcttagctagatcgcggccagttaataagacgcgtttccctgttgctgctgcagcatttaaaacttcttgaacacgattcaagttagaggctttagcagctacgataattctgcctttagcatttctgaagacattagtcacaaatttaccaatatcttgttcagatgcattagggaaagatgcttctgcattagatgaatcacttaaaagcgctaaaacgcccttttgttcaatttcagctaagcgatccatatcagtccgataatttaacgcagctgttggatcaaatttaaagtcaccagtataaacaatttcacctgctggtgtatgtacatctattccaagtgaatcaggaattgagtgtgtcgtatggaagaatgaaatacttgcattcttaaaatcaatttcagtatctgcatcgattacgtggaacaaactattcttacggcgtttgttttcgcgttgtacttcaattttagcaagttcgatactcaattgtgaaccaaatactggaatatcgtatttacgcaaaatgtatggcaatgcaccaattgaatcagcatgcccatgtgttaaaaagatacctgctactcgatctccgtattgttcaaagaaatcaaggtcaggaattactacatcgataccaaataaagaactatcagggtactttaatccggcatcaagaacaaaaatttcatcattaacttgaacggcaaacatgtctttaccttgttcacgcacaccgctcaagatcataattttgatttgatcagccattatatttccttttctatctaatttttaattcttatggatctatcgatctcaacgtaaaaataatctgtttcaattttagcataaagaataaaattatgacagagacaaaaaaagccagccttttcggctagcttcattattcaatattatgtgaaaattaacgacgaagacctaacttcttgatcaattcacggtaacggttaatgtcgttgttttcaaggtaacgaagcaagttacgacggtgaccgatcttcttaagcaaaccaacgtatgagtggtggtcatgcttgtgactcttcatgtgatcagtcaagttgttgatatcagcagtcaaaagagcaacttgaacttcaacagaaccagtgtcaccttcgtgagttgcgtattccttcataatcttttctttttcagtctttgaaattgccatagttaaattcacctttcattaaataattgccgttaacaacgtttatcgtcggcgtgaacaaataaacagcgttagcggttcacaacagtcataatcatacacattattttttaaaaaagcaagcagaaattaccttgcatccgtgatatttcttaagtataatggatgaagtaaatttctaaatcattggaggtgaatttcatgccacaaatcaaatcagctatcaaacgtgttaaggctcaaaatgctactaacgaacgccgcgcttctgaattaagcaagttaagaactgctatcaagaagtttaagaacgctgttgaaagtgatagtaaggaagacgtctccaagttgcatttagaagctgaacgtgctttggataaggctgcttcaaaaggcttaatccacaagaacaaggctgctcgtgacaagagtcgtttaaacaagttagcaaacaagtaaatcttacttattactaataataaaaagaggagatctgcagtgatctcctctttttgtatactcttagacatttaagataaataatttcaaaaaattatcttctcggtaagttccatttttatatttaaattctaagtcgattgcatcccttaataaattttctagcttgtctatcttcaaccgattacgtagggctaacttaaccctatagggatgaacgcctaattcttttacaatttgtggttcgctacgacctctttgtgctaagatcttaacgaccaaaatcaattctaattgattttcaaagaccgctaataattgaattggattagtcccttcacgtaattgattatctaagcgctcaactgcttcacggtaattcttatctaaagccgactccaaaatagcgaaaatattttgtgctagggacaaatctacattttgcattactgatttttcagtaattttgttatcggtagctaccatttttagcttttgataattgcttaaaatagtgtcaattacctgatcactccgctcaattagcagctgtaaagctgactgtgtgattatatatccctcatctttgatcaaggctttagtcgttgaagcaacttcatagggcctaatttgtggctcaaccacattgaattgctttagaacagttttagtcagttttttacgcctatcaattttttcataagaagcaacaattactactacatcttctaaatcagctaagttttcaaaaatcttttgtaagtcatcaatttgtttctgtaattttttagataccttagctgttaaaaagaaaggatttttgactacaataaatttctgttcactaaataaactggattcagttaagctcgcaatcaattcatctaagccatcgctttcgcaatcgacagtcacgtgctccaaatctttaaagcgatcttccttggcatatgatctcaccaagtaatcattgagaaagtcatctgcaccccaaattaaggtatgtggattattgttatttgtatttttaaacaaagaaagtaaggtcattttttatcccgctttaaaaagtaactaaatctaggactttgcagtccgccataataccagctaatcataccacagtcttgcgttgaaacccatggtatttgctgttgagttagtgtcgttagcgtctcttgatgggggtgcccgaacctattttttcgaccagcagaaataaaaacttgcttaggatggattgcacgtaaaaagtctggattggatgatgttttactgccatgatgacccaatttaaaataatctacctgaagtttcatcctctgcataatttccttttcaccatcttgacctaaatctcctgtaaacaaccaattcttattcgctactctaaaaagcaaactcagggaatcttcattctttccttctcctgcttgatatggataaaccacattaaatgtaatctgcggttctttcacccgcattcctgcaagtaactccaataatttggtatcttttacacgaccatctaatctcttttgaaaagatggattcttaattagtccttcggccataaataatttcttaacattaacctgctctagtaatggtcctaaatcaccaacgtgatcggcatcttgatgcgaaacaaagactccatcaattgtattaattccctgacttttcaaaaatggaatagtaattcgatcaatctgaggtgtctgctttttgccactaaagtttagtttcccaccagtatcaattaaatataccttgcgaggaaatggcgtagtcactagaatactatctccttggcccacatcaatgaaggttacttgccctcgcaaaggaaaatgaatcatgctgaagaaaattacatacaagctcaacaagcccaccataattttcttactattaaagcgccagttaactttttctcttaaagaaacaattaaaataatcgttactattaatagcaacagacactgccaccaattaatttgcccaaaagttagtagtcccaacttagtagcagataattgcccaatgattttctcacctaattcaagcactttttctaataccggagcaaaatctttagtcagaccaaacgtcacaatattgaaaaaagcaattggtaaaactatccaattgaaatatggcactactaacatattaaaaattagagactgtaaaatagtttgtgtaaggatgaatgattccttaaatttatttctttaaacattagaaaaaggagttcctttctcgtatgattggtttgaacaaaaaaacacatacagaaagaagaactccttcatgaatgattttaccaaagattttgctcaagctctattcaatccagacaaaataaatgatttattgcgcaaagagctacaacaggctgttaataacttgttagaagctgaattgactgcctttctgggctatgatccctatgccagaaatggctggaatactggcaactctagaaatggtgcttatttccgcaaagttgatacgcaatttggcccaattgaagtgcaagtgcctcgggatcgcaacggtcaatttcatcagcacacgctgcctgactacaagcagcactcggatatcttggaaagcatgattatcaagctttactccaagggcgtgaccaccagggaaatagccgatctaattgaaaagatgtatggcagccattacagtccagctcaggtatcaaatatttccaagcagatgattccaaaggttgaggcttaccacaaacgcaagctaagcgacaagtttttctgcgtctatttggatgcgacataccttcctttgcgccgagaaacatttgagcgtgaagcagtctatattgccattggcatcaagcctaatgggcacaaggaggtcattgactactgcattgcacctagcgagaacattgaagtctggacagatatgcttcaaaacatgaaatcccgaggcttaaagcaagttgagctttttctttctgatggtgttgttggcatgaaaacagccttggccaggacttatcctaaagctcattttcaacgctgtttggttcatgtcatgcgcaatatctgcgctaaagtacgcgtcgacgatcgtgaaaagatcatgaacgaattcaaacaggtgcatcaacagacaaacaaagaagaagccacagctgtcctgcatgacttctataccaaatggggcaaggtttacagccatgttatcagaagcttgaaagacatagaaccagatctgctggtcttttataactatcccaagcagatcagagcttcaatttattcgactaacatgattgaatcatttaacaatgtgatcaagcgcaaagctaagcctaaggcagagtttccaactgaacagtcgcttgatgcttttattggcattcaggcaatgagctacaatgaccgttatttcaatcgaattcataaaggctttggtcaggttcaggacaccttagaatcctactttgattaaataaataattaaaaaatcaatttacgagaaagaactatttacacaaaagatttgacagtttcaaaaattacagttaaaaaattgacctgataaaagaaaagcaatagtaatggcgttaataaaatatttaacaaaattgcttgtttaaaactgccaaacttatcagttaactgtaaacccaatgccaaaatatagctcaataaggctccagttgccagaaataaacgcggtactactaaaagatgtaaaatgcaggtcaatcccagcagatctatcgacgcaacatgatatttcttaaacttacaaattttgcctaaaaagtaggttaaactagctcttacaaagccggcttgaccattgcttagaaaaatacctagcaataaaaccaatgtacagcagacaaaagtttcttcatccgtcagtttcaagttaaaacaaaatacactaattaacaagacatagattccaacatgtaagcctgaaatgcttaacaagtgaataacacccaaatctcgataattatttagtatttcttgattttcttgagcattattttcacccaagattaattcactagcgaaaaagcctaataactgtggcatcttggcaaaatagttctgcaattcaaaacgtaattgatgcaattgatccccaaaatcagtaatcgataatagcttcatttgacaactactgtatttcaatttttggtaaatctgttttgcctgataataattctgaaaattaaactcaccaatattagttgctggctcaattgaattgcattccccattaatttctgtcactaaaatagggttcccatgcttaagcagttctttttgaacatctgttaccttgccaccaattaaaattttaccttgagcgaaattacccacacctgttaagtagtcgtctttaattcttacctgatcagggtaaattcttaattggctctgctgggttaaaacaaaattggtttttggtttacttaaaaaaatcagtaatagaaatgctccaactattagactaactatttttaaactaactcgatatttttgtactaacagtagcaaaaagtaacccagaaaaaataaagctactattttttgcaccattgttgtacaagaaaaagccaaaaaagagattgtaattagcaacaaagcggttattaagtaaaagccaacttcatttttaaacagccaattgatctttaaggctcgcaaaagttttttctcctattcctgatacctgcattaaatcttctatctttttaaaagaaccattttgttcacgataagcaataatctgttctgcctttttttgaccaattccagttaacttttgtagttccgttacattagcagtatttaagttgatcttagtgccatccccttgattacttgggctactgctactagtactcccactattttgactattatcagctgatcctgcagttgccacattttcaaccttttcacccttgtaaggaatatgaattttatcttgatccttaagcaaagtagcgcggttaatagcttttaattgtgctctagcagtagtacctccagccgcctcaattaactcctgcagacgagcaccatttttcaatgtatatactccctgatgcttcaccgcaccggaaatatcacaagttacagtcttagaaacggttgttgaactactgctagtcactgcattagtattagtggttgcacctgaactactagtgctagactgcataacttgatcctgcactgcagcagcattttcttgatgatcccctttcttcaatccataaaatccaactacaagaattattgcaccaatgagatatgcttttttctcaagcacaaattcttttactttttcaaaattcataaaaatcacctctactatttattacgcaaaaaaagcccagaattttttctagacttcaaattttttgaatttttttagtagtgtgtctttagatagtttaatgcatcatcaaaagtgctcacagggacaattttcattttggtgtgaattttctttgcggttctcttagcaaccgcataattagtttcacttttcttcacactggttgaatcagtcggcgcaaagaagacctctgcaccttctctgctagcagctaccacttttttatcaacaccaccaatgattcctacttttccggtaggtgaaatcgtacctgttcccgcaatcttatgtcccttacttaagttctgcttggtaaagacctcatagctttcaagtgtaaacatcaatccggctgaggggccaccgatttcgccagcattaatttttaacttaggcttagttttcacaactacatgctcaactaattgaatcccaattcctggcttattagtaccctttactttaacaattttgccagtaaagtgtttctcttgcttaccacgcaaaactgagattgttactcgtgcaccaatcttttgtttacgcaaataatccatcatctcttcagttgagctgaaacgatgcccgtttgcgcctaaaacggtatcaccaatttggagcttatttttaaaactagaatttttctggacttccattacataaacgcctagatattttaagctatgctggttacctgcttttttagctgcataataaattgcattctgctgacttgtttccatataccagttttgcaactcattatattgagcactagtttgacctcctagcagctccttgcttgatacacgctcatcatacggacgagtaaaactccatagatattgcaaaaccggagccggccgactagttatgctaactgtcaccaaataaaaattattcggacgtttatttgatgacttaataaactggcccacgggcattgcctcaccaggatattcaatataataatcggtcggccaaacagcaagtaccactaataaaacaagcgcaattagtgccaagagccaattacgcaagtgctttttcgattgattgtttttcttattattcatgttttagcttctctctcaatgcaatcgctgcttttttaggtaaaaacagactaacatcttcatcaaaacgagctaattccttaatcatgcttgaagctacaaaagaattttctggactcgtaaaaagcaaaactgtattcacatctggagccaattttttattaatcccagcaatctcctgttcatagcggaaatcagcactgttgcgtacaccgcgcaccataactttagcatgcaattcatgtgctaaatttacagttacttcttccggtctttctagcacttcaatattaggtatttcccttagtgcatccctgattagatcagcacgttcttcaggcgtaaacaagtatttcttagctgtattggtcatcgcaactacatatactttatcaaaaatttcagcagcctttttagcggtctccacatgcccattagtaatcggatcaaaactccctggaaataaagcgattgtcattattagtcctttcgataaatcctcacaattgtttttcctaaatggtgttctttgatcaatgaaaaaccagtaatttcacccagttctgtatgatcatcagtttctgctaccacaattgcatgatcattaagtaggttcgactttaccatctgcaacatgtccttagcgattttttctttggcatagggcggatcaagaaaaactagatcaaacttttcatcattctcagaaaataattttaatgctgcagagctgcgcatattataaacattaaaacgctgctcttccttagttaaagcaacatttttcttaataattgtacaagcagcatgattaatatcaaccagactcgcatggtcacagccccttgaaacagcttcaattcctaaggcaccactaccagcatataagtctaaaacattaccaccctgaaaaaattgtcccaatgaattaaaaagggattctttcaccttatcactggttggtcttgtccgattacttttcaaagtaaataaatttcttttagcatatttccctgaaataattctcattttagttgattctcacttttttcttgttcaagttgcaatttcttttctgctttttgggccatctcagctaattgattttcaatatgttggctatccaaatttacttcttcttcagctgaaatttcgacatgattaacaaaatccaaatgagcaatttgtcctttgatttcattgcattcgttgcgattaacataaagaacacaatatttcatttttttagaaaaataaacaatgtcaccaaaatggcgcaacttatattgatcactaactgattttaaataaataatcaatgctacccttttaattaagtgggtactttcaatttctttattgatactcatgcaactgtttcatccttttcctgtaacattttttcatttgctgaaacgttcagtactaaaccaatcgcagcagtcaagacaatcattgatgaaccaccatatgaaataaatggcagcgtaacccccgtaatcggcaacaatcctagtactgcaccgatattaaagaatgcttctgtaaaaataatagtcgtcacgccaaagcaaattaatgcgtcgaattgagaaaccgcgtgaaccccaacttccataatctgccacatcaaataaaagagtaatccaaccaataaaattgtcagaatcacacctacttcttctgctgtaatggataaaataaagtcggtatacggctctggtaagtaacctcgcttttgcatactattacctagtcctacgccaaataatcccccattgtggattgcataataggagttaactagctgggccccacctttttgctctaattcaaagggatgcaagaacgacattagtcgttggaattgataacttctttgtaaaaatccaggattccaggcaactacaataaaaaatacagctgtcactaagatcacaatcccagctaaccaagttaaagctaatttagttggaacccctgatactgaaaacattactaaagtgatcataaataaaattgctgtcccaccaaaatcaggttcaacaataaccaaacacattaaaaaagccgccaaaattgctgggtgtgacaaattatgtttgatcttacccttgactaattttccatctcttctgtctagtacatatgacaaataaatgaccagagccaatttagtaacttctagtggctgcaaattgataaagcccaagttaatccaacctacagcaccattaactgccgcactactgccatgagcaaaacgtagaaatactagccatcctaacataagtatacaaattaataaaaatccccctacaaactttggatttttaaatactttgattcttaatgcaaaaaacggaatcccaaacaaaaagaaagctactatagcatagattgcttgccgtatcccatagacatttggcttaaatccattaactaataaaatatctgaactagctgaatataccaaaattatcccaaccactactaaaataagatagggaataaaaatctggtaattaagataacgtaattttcgacgcacaagcgttgcccctttatctaaataatacttttttcattataaaacaaaaagatcatcacttctatcaagtgacgaccttttaaaatttattaaactatcttagttagcacggttacgcttcttatcagccttttgacgttctgaagtgttcaaaatcttcttacgtaaacgaatagattcgggagttacttcacaatattcatcatcatttaagaattcgatagcttcttcaagagtcaacgttctaggagtcttaatagcagcagcgtggtccttaccggcagcacgagtgttagttaagttcttacccttagttacgttaacagcaatatcacgttcacgtgatgattgtccaacaatcataccttcgtaaacttcaacaccagcaccgatgaataactcaccacgttgttctactgattgaagtgagtaagtagttgattgaccttggttaatggataccaatgcaccattacgacgacctgggttccagttctttactactggcttatatgcttcaaaggtgtggttcatgataccatatccaccagtttgtgacatgaattcattattgtaaccaatcaaaccacgtgatggaactaaaaattcaagacgagtttgaccattaccagttgattccatattcttcatctcaccttttctttgtgaaagtgagtcaataacagaaccaacatattcatctggagtatcgatttgtactgattcaaatggttcgcacatagtaccatcaatttcacggtaaataaccttaggacgtgaaagttgtaattcgaagccttcacgacgaagttcttcaaccaaaattgaaaggtgaagttcaccacgacctgaaacagtccaagcgttcaattgatcagttggttcaaccttcaaagaaacatcggtacgagtttgacgaatcaaacgatcttcaagcttcttaggagttacttgatcaccttcacgacctgcaaatggtgaatcgttggcaacaaagtccatttgaagagttggtggatcaatcttaagaagtggcaatgcttctggatgttcagctgatgcaatagtttcacccacgtagatatcattaataccactaatggcaataatatctccagccttagcttccttaatttcgttacgtttcaagccaaagtaaccaaataacttagtaacacggaagttttgagttgaaccatcacgcttcataacagtgatgttgtcactaactttaaccttaccacggtaaattctaccaacaccgatacgaccaacatagtcatcccaatcaagcatggtgatttggaattgtaatggctcatcagagttgtctactggagcaggaatattcttaataatggtatcaaagattggatccatagtttccttttgagtacttggatctggatcatatgatgaagtaccattcaaagctgatgcataaacaactgggaagtcaagctgttcatcgttggcacctaattcgatgaaaagttcaagtacatcatccaaaaccttcttaggacgagcgcctggacggtcaatcttgtttaaaacaacgataggttttacgccagcttccaaagctttctttaaaacgaaacgagtctgtggcattggaccttcataggcatcaaccaaaagcaatgcaccgtcaaccatgtgcataacacgttctacttccccaccaaagtcagcgtgacctggtgtatccaagatgttgatagtagtatccttatacttaacagcagtgttcttagacaaaatagtaataccgcgttcacgttcaatggcatttgagtccatagcacgatcttccagattcatgtgttctggcaaagtatcagattgcttcaataattggttaaccaaggtagtcttaccgtggtcaacgtgggcaatgatcgcaatgtttcttagatcgtctcttcttttttctgacaaaagtattcctccccactcttcaataaaaaaactgtgactctgtcacagtttcggtaacgcattagcgccttatcgaagtgcttttcttaaatctgtatagttacgttagtgaattttaccacctaactgcatacgggtcaacgcttaacaatcaagttaaccctggatttttttatgcaaaaacaagcaaaaactattaaactatggtaaaaatataatgtagataataatttttaaaaaggagtaattattttgatcttaatgaaagatatcgtacgtgacggtgatcccgtcttacgtcaagttgccaagcctttaacatttccatttagtgatcactataaaaaattagctgatgatatgatgcaatacttaattgattcacaagatcctaagattgctgaaaagcaccaattaagagcaggcgttggcctagccgcacctcaagtaggtgaaggtgtacaaatggctgcacttttagttcctgatgatcaaggcaaaattatctttaaagaagtttatgttaacccagagattgtctctgaatctgttcgtcaagcttgtcttagcgaaggtgaaggttgccttagtgttgatgaagttattaatggttacgttccccgccctgataaattaaccattcattactacaccgttgacggtgaagaaaaaaccattcgcttaaaggattacccagcaattgtttcttctcatgaaattgatcacttaaatggtcacttgttctatgaccgcattaataagcaggatccattcgcacttaaagaagatacagtcgtaatttcttaattgttatttaaccaaaacaaaagcctgcagatgcaggcttttttgtataaaaaaagtcactggttaactaggccagtgactcatacattgggaattaagaagattgaagagacttcttataacgagcaaatgaatttattaatcatttactacatgattatcgtacaactgatgttattttacgtcaataacattgaccaaatttaatcggtaaaaatcaaaagaaacataattatacgcgtggtgctagttaaatcgttctagacaataagccaaattataagctaaaattgcaatttccaaccggctttgaaagcctatcagactacgtgctcgattgttctcggcattgtaataggtcagaagcgaaaagtcgctttcaattgttctgcgaatagccatcaattgatgatcattgtgctttttagctcctgtcatatttttacgatatggtgtccaaagttcataacccatttgttttagctgttgatgcagttctttgcctaaatagccttcgtcgccaagaagatagtaattagatggatgggtattttccatcagttcaactgtctccctggcatcatgaactgatgcttttgttacgacataatcaagaatgtaaccgtcatcgctaacaatgacatgaactttgaaaccatagaagtaaattttcttggtggccttataaccaatgttggcataaccgcgaaaaattttagcacgatagttgcgaattggttggcaaacaggtaccggaaagctgtcaatgatcaagaactgtccattcaggtcaacctttttattcatttcttgccgtatctgataaatcaattgcaatagctgacgtgaacgtcgattaaaacgtgagtgtgataaacaattgaaacattcacagaatcttctttgtgattcaattcctgtcttagcttgccagataagtaaagccaaaatcagactgtccgtagttttaatttgatcaatatttcgccgatgagtaaactcagccggtgcatacaaacgataccagtgccgacaaattatcactaaatctttaaaactaacttgtaaatggtggctaaaacgcttaagcttaaggcagttcaatcagatcagactcttttctttttgatactacaacttgagtctagtccgattggacttttttattaactaaaacgatttaactagcaccacgcgtataattatatacttaactttataattatgataaaatttttatagctattgagtaatttttactctacattgaacgtttatacattaataaggagaatcatttatgatttacaaagttttgtatcaaaaagacaagattgtcaatcctcgtagagaaactacacaaactctttatatggaagcagacaacatggtcgaagcaagaagtatggttgaggacagtaccccctataacattgaactcatccaagaattaactggtaattcgttaacttacgaaaaagaacatgctgactttaagttaacaacgttcgacaagaagtaataaagagtgcgaattaaaaataatgaagtagccgtttatgcaatcggggggttgcatgaaatcggcaaaaatatgtattgtgttcagtatcaggatgaaattatcatcatggactgtggtattaaattccccgaagataacctattaggtattaattacgttatttcagactattcttacctaatcaagaatcgtaagaaaatcaaagctcttgtggttagtcacggacatgaagaccatatcggtggtattccatttttgttagaaaaaattcctgaaattcctgtctatgcgacaccatttgccctttcattaattagaggcaaattggaagaacacggaattttaaagacaactgaactacacgaagagcatgaggatactgttttgaagtttaagaaactttccgtttctttctttagaactactcactctattcctgatactttaggtattgccgttcatacaccactcggtgccgttgtctttactggtgactttaagtttgacttaacaccagtaatggatcaacctgcaccagattttcaaaagatggctcaattaggcaatgaaggtgtacttgctcttctctcagattcaactaatgctgaagtaacacaatttactaagtctgaacgatttgtagctaagtcactacataatatcatcactggaatccacggtagaattatttttgccacttttgcatctaatctttatcgtgtatcaactgctattcaagctgcaattgataccggtagaaaggttgcaatttttggacgtagtatggaaaatggcgttgataatggggtcgacttgggctacttaaatttgcctaaggatctaattgttgacgcagatgagatcaacaaactaccacctgaaaaagtaatgattttatgtactggttctcaaggtgaaccattagccgctttatcgcgaattgctaatggtactcaccgtcaaatcagcttacaacctggtgatacagtcatcttctcctctaacccaattccaggtaacacattaagtgttaaccacttaattaataagttaatggaaggcggagccgatgttattcacggaagagtaaataacgttcatacttccggacacggcggccaagaagagttaaagatgatggttcgcttagttaagcctaagtacatgattcctgttcatggtgagtacagaatgcaggttattcacacccagcttgctcaacaagccggtgtacccgctgaaaacacttttgttttatctaatggtgaagttgtctgctttggccctgatggcgctagaatcacaggacatattcctgcaggtgacgtttacgttgatacttctggtactgcagatgttggcaacgttgttgttcatgatcgtcaaattctttctgaagaaggtttagttgttgcagttgctacagttgattataagcacaagcgagtcttagctggtcctgatattctcagtcgcggatttgtctacatgcgtgaatcaactgagttaattagtcaagcgcaaaagcatgtttatcatgtgcttagaaatgaaatggctaaatcaaatagaccaaaagaaagtgacattaaaaaggcgatcaccgaaaatctttcagacttcttgtattccaagactgaacgacggcctatgattttaccaatcattatcgaaaagaaatagtaaaaaagactccttagggagtcttttattttagaaaatgaataatatgcataaaaaaattaaagttcagttattagttaatgaggtcgctgggaatggcaatgctattaaagctgataaagaattacaagatatactaaaagaaatgaatacgcgtggtgctagttaaatctttctagacaataagccaaattataagctaaaattgcaatttccaaccggctttgaaagcctatcagactacgtgctcgattgttctcggcattgtaataggtcagaagcgaaaagtcgctttcaattgttctgcgaatagccatcaattgatgatcattgtgctttttagctcctgtcatatttttacgatatggtgtccaaagttcgtaacccatttgttttagctgttgatgcagttctttgcctaaatagccttcgtcgccaagaagatagtaattagatggatgggtattttctatcagttcaactgtctccctggcatcatgaactgatgcctttgttacgacataatcaagaatgtaaccgtcatcgctaacaatggcatgaactttgaaaccatagaagtaaattttcttggtggccttataaccaatgttggcataaccgcgaaaaattttagcacgatagtttcgaattggttggcaaacaggtaccggaaagctgtcaatgatcaagaactgtccattcaggtcaacctttttattcatttcttgccgtatctgataaatcaattgcaatagctgacgtgaacgccgattaaaacgtgagtgtgataaacaattgaaacattcacagaatcttctttgtgattcaattcctgtcttagcttgccagataagtaaagccaaaatcagactgtccgtagttttaatttgatcaatatttcgccgatgagtaaactcagccggtgcatacaaacgataccagtgccgacaaattatcactaaatctttaaaactaacttgtaaatggtggctaaaacgcttaagcttaaggcagttcaatcagatcagactcttttctattattactatttacaagtcgagtctaacaagattggacttttttattaactaaaacgatttaactagcaccacgcgtaaatgaatattccttttaagcgacaaaaaagtcattatcctggagaattagtcgttctagcacaaaattacgctaatttacatctctcttctgaacatgttttaatcgtagttggtggagatggctcctttaatgaagttttaaatggaataaagacttctaattatcctgagacagctattacttatttgcctgcaggaacaggcaacgattttgcccgtggtgctggattaaccgcagatcccaggcaattaatcaacaatttgctccgagatcctgaaccggaacaagttgattgtggttttttcacatcaaatattaaacaaattcctaagggttactttgttaataatttcggtattggttttgatgcctttgttgttcatcagagtaatcatgagcaattaaaaaaacacctcaatcacctcaattctggaaatatgatttatggcctaaatataatcaaggcactaattaagcaggatacctttacagtgactgttaaaactaaaaacgaaactcttcgttacggagatgcatactttgtcactactactaaccatccctactttggcggtggttttgctattttgccaaaagcggacatttacagtcaccatcttgatacagtaattgttgaaaaaccgagtttacgcaagtttctctggctttttggtaagctgatcaaagatggttcacacgttaatgcaccagaatttcattatattgaagctaaagaaatcctagttcaaaccaataaaagtgaatatgctcaaattgatggtgaagatattgaaaagcagcccttcaaagtaacatttaaagttgatcattttaatttattaaaataaggaagaattccaaattcttccttttttatatcttatctaaaatatctcttttcgaattatgattttgataatattggtcctgatcaacgaaatcatgtacttgatcataaaatttcttccaataacggtatttttgatactgcttttgccactcccgtgcttcctgcaagtaattaccaagaagtccattaatctgatcgatatgtttaatcacctgattagcatgatacaattgctcttccacctgcttttgagttaacgttgactcctgatcttcaaaaaatagaacattttcttgataatttttttcttcttgcaattgtttactattgtccatttcttctttgatagctgcaatttcgtctggctgtaatccaattccagttttagctttgactaataacgactgaatatctgccaattgcacaacatctatttccattttttgataacggttcgaatcagtcaatgtgaactcatcatctgttctacttacaaatacaaccacgtttctgattaattgatctatatttggcaagcgtctcaataaattaataatcactgggttgttgcttttttctaggacatatttaatactttctttatgcttggccacttgatcggctatctgatcataatcagcctgcacattatactgtccatttttacttgttcgtgctttggtttccaagcaaaaaatcccgctagtcgtaattatcacatgatcaatttggttactccctaaactattctttttttcatagggatatggtaacagtaaattatgaattatttctttccctgtctgcacttcacgtaaacgagaattcactaattcttctgcggcagcgcctgccaagagattgctaagatggcgcaaatcacgttgagataaaatattcataggtcgcaaatgttttatttgattcaaatgtagttcagtcattcttttctgaaatgcgtttactttttgattgtaaaccttatagccagaattaattgcccgaattcgtaaaacattttgcagagccaaagctcgtttcaaatcacgtttattattcaacaaagttttttcaactatcatagcatcatgaacagtttgtgaatcagttacttttttatgtgtaatccaagctttttgataactagcatgattttctaactcattcacatactgatttaagtcattttccaaaggcaaaattttgtttctaccttctttgactattgagccataatagcgcaaattttttgtaatttcgtctaactcattgaattcatgtttgccataatggtaagttaccttagtttctccattccaactagtcttacgccaataatgaccatccgtctcaccaaattcaactaattccgccactgaacgatctaaatagtacttaatcaaataatgacaatggcctttattgtcaaaaatgcgtcgcttaatataacccggtcgcattaattcaatgatctgaaaggtcaagttcttatgattaggaaaacggtatggtaatcttttgcctgcaattttttcaattttagttatttctttcttatctgttacagataattctatttttttcattttcttcttttttcgcttttgaaaaaaataataggttaataagcctattgttagtgtaattattgtaatatccatgttaattatccatattttggaacgtatgtttagacaacaataattataccatgattttgtataatgaaaaagccccttgttttaacaattcaaggggcttttatccttataatttgatattttccattccaatcattggatcaatttcaccagaatatattttttccgaggttagaacaaaatcttctgctacttctgctttatcggtttcattctccatttcttgagctttttcgtgctgcttgctttgatcagatttatccaatgattttgtaatacccaattgctgacaaatcttcgctgctaagccagtcttacgatcatttcccggcgtcttaaaagctgccacaaatgcccgtggatcaccaactaatactaagtttttctcagctcgcgttattgcagtatacaaaaggtttcgttttagcatcacaaaattctgcatggttagattcaagatcaccaatggaaattctgaaccttgtgatttatgaatagtgattgcataagcccgggtcagatcatttaaatcttttctagaaaaggcaacttctcttccatcaaaatctgcaatcatgcattccttggcatcatcttcatcaatgctaatgatcttaccaatttgtccattataaatatctttttcaggattattttgcaattgcagaatacgatcgccaattcggaaaacttcattatgtgcttctaataccttacttttaggctgagatgggtttaaaattgcctgaataacattattaagattagttacaccaccattgccaagatacatcgcgctaagcacttgaatatcatcttttgcaaatccacgttttaaagcaagtttaacaatttgtccaactgcatcccctactaattcgggacgacagctaataaaagaataattatttgttttcttaaacaatgcttgctgatctttaccctcattaacatcatgcgccaaagtaataatcgttgaatcatcaccctgtctatgaatctgcttcaaaatagtagttggaaacgcttgcgatttaatcaggtcactgaagacattgccagctccaaccgaaggtaactgatccttatcaccaacgaaaacaatatgccgcgtatcatgaatacttgccaaaagttgtttaaaaaggaacatgtcaaccatcgacatttcatcaacaattaagatttcaccatttaactcattcaagtcctgagtgttagtatcaccaatacctaaccccaacattcggtgaattgttttagcactgattccggtaatttcacccattcttttagctgcacgtccagtcggtgctgctagtaaaaacggaggatcttcactgtaaagagcggaggaaggaatctcagccagcttgcgtaatactaataaaattccattaatgatagtagttttacctgtacctggtccacctgtcaaaatagaaatcggttggttaactgcgtttttgatggccaacttctgtgtatcgtcgtagtgaatcttaagttccttttcagcatccttgattgcttgctctacctttttatcatcatattgttctctttttttatcttcttttttttctaccaagtttttcatcaagcgagcaatatcaacttctgtttgataaatattttgtagagcagcattctcaccatcaactattactttgccagcttcttgtaaactattaatacagctagcaattgggtcgaattgattgatttgaagcaatttacttgcttctgttaataactcagctaagcctacataagtatctccctcaccatttaaagcatcgagtaatacttgataaacagcacctttaattctacgtggatcatcactagcaatatctaattggcttcccatcatatccgcggttttaaatgcaaaacccgaaatatcattaactgctgcataaggatctttctctagttttgctaatgcttcaccatgataaagctggtaaacccgtcctgcaatacgcttattaatgccgtatttagccaattttaaaattacttctgaataagaatccatcgcatttagtcctgccaaaagactatccttttgctttctagttaaagaaagcttatcaatcttagctggactttccttcaatacatctaaggcatttagccctaattcatcaataatcgtagtcgcagcctttttaccaattccagggaacttattcgaactcaaatacttagttaaagatccctcttcatgtggcaatacttgcttatagttatttgctctaaactgcaagccaaatttttcatgcattactagtttaccctcgaagcgatagctactattaatttgaatatcgccaaaattccctgtcaccttaatatcgggacgagaataatcggataaagtgccgataatttcaacgtcaagaattttatacaagtctttactattttcaaaaacaatcccgttaaccttaccggtaaattcattcataatttttcttttccttgtcatttagcatcttcataattgaagcatactgattcattgcttgttgataatacttagcatccatctgcttagcttgagcaaaatatttttgagcctggtcacgatctttttctaatgtagtgacacctagtaaaaaataaactttcgcatttttcttattatcaggaattgccaaatacatttgctgagcctgttgattctcacccaaacttaaccaaatatcgcctagcaattcctgaattcgctcatcaatttttttgatcgtcaaagcataagctaaagctttttggccttgccctaattttaagtaagttagtgccttttgataaagagttaagtcatcattaggtatctgatctaataaagccagtgctttatcaaaatcgccttgcatgtaataacacactgccagattataatttaattcttgtggctctttaaccagatgctgggcctgctccaatagcttctgtgcttgatccaagcttccttgctcaattaaatacgtcgatagctgcaaataattagcaacttgttgtggatgctgatcgatttttttgattaaaagatgaatggcttgttctactttaccttcatcataaagttgcgctattttttgatccattataacgagtccgtcttcgataatttacgtcctaaataactagtttcattccacactaccggtttaaaagtctttccgccatctagtgtttctaagacagttaaagaggtattgctaaggccgccatttttgcgaatatctttcaatggatagcctaaaagtccacccataatagctgataatgccgcaccatgactaactgctagaatcttatcatcatcgtcaggaaatctttgtgccatttcttgagcaaatgcttttccacgagcaataacatgtggataatcctcaccatgaagttcagtcggatcatatttatctggatggtgccaaaaattatccatttgtttagggaattttttctctgcatccccaaacttcattccctccatatcgcccaaattaaactctctgagtcgttcatcgatcacaacaggtaagttagcgttcattgcatcatcgatgccctgagcggtattaaaggcccgatcaagcggactggcaaaaattcctctaaatttagttccttgcaagtgatgacctaatttttttatatcttctaagctttgtggcaaaagtggtgaatctccatgtcctccttggaagcgactagctaaattccactcagttttgccatgacgaacaaaataaatttgcattgcttaaatccccctaattgtctaatcaataagaatagtttagcacaaagaaaaaggcgttcgaaaaatcgaacgctctttttgcatattttttaaactaattgtaattgcttttcttcttggtaagcagcatcaatattaccgccacctaaacattcttcacccttgtataaaacaagtgcttgacctggtgtaactgcacgagctggctcatcaaagtaaacatcagcagtattgtctgcggcatgatacttaacagtcacgccgatatcacattgacgataacggaactttgcagtacagtgcatctcaaaatcatgatctggcttaccagtaaagaatgacatatcacttgcattcaagcgactagcatatagaagtggactatcatagccctgctctacaattaattcattcttcttaagatccttgccgaccacgaaccatggatcagttgattccttagttgagcccaagcccaagccctgtctttgaccaatggtgtagtacattaaaccagcatgctcaccaactaccttaccatcaggagtgaccatcttacctgatttagctggtaagaattcacttaaaaactttctaaagtttctctcaccaataaagcagatacctgtagaatcttttttcttcgcggtagctaaaccattagccaaagcaatctctctaacttgtggcttagttaggttagctagagggaaaataaccttactaatctgctcttgactcaattggctcaaaaagtacgtctggtccttgttaccatccttaggacgcatcatatgagtaacaccattggtatccttaacagtcttagcatagtgccccattgcaatgtagtcagcatccaagtccatcgcaaactccaagaacgacttgaacttaatctgactattgcacattacatcaggattaggggttcttcccttcttgtattcatccaagaaatattcaaaaacgcggtgccaatactctttttcaaaattaattgaataatatggaataccaatcttatcggcaaccttttttacatcttcatagtcttcagtagctgtacagacgcctgaatcatcggtatcatcccaattcttcataaagacaccaacaacatcgtagccttgttgtttaagtaaaagtgctgaaacagacgagtcaacgccaccactcatacctacaactactctagtcttgctattgtcaaccattattcaatcaatcctttacttcaagcaaaatcttacgctcctcaagatcctttaaaatataatctaaaagttctacagtaggagctaattgcttatttttaaaaatattaaccttctgcaaaccgttgcgatcagtaataaccatagttaaatgcgacaagtccttattaatggtcatctttaacttagtaggcgcgttataaggtgaatcattgtaaagaggatgttcataattaaaattacccttagctgtcttcacaaagccagcatcaatcaaagcataaagcttcaactcaagattcaaagtaaacttacgtttatcaccattaatcacaactgtatttgccataattttcctcacttatttataataagatactttctttttgaaagcaactatttatttttagattgaattctttgtacaatttttactaattcttgagcgaattgctcaatttcttcatccgtattataacgcccaaatgaaattcggatcgactcatttattcttggtgaattttctccaaaacaagcaattaaaacatgtgatggctccaaagaaccagcagtacatgctgaaccgcctgacacggcaaatccattcaaatcaagatttgtttgtaaagaagtagtagatacaccattgagatgcagattaagcacatgatgtgagtaacccggaccatacccaccattaatttcataattaatttgatgatcgtctaattcctttaaaataatgtcttgataatgagcatatttcttttgcaaagcatcacgaccaatctcggatacttcacggacagcttcgccaaagccggcaattcctggtacgttctctgttccagctcgacgtttggtttcctgctcaccgcctaaaatcaaatttggaatatcgatatccgcattttcatataaaaagcctaaaaacttaggtccattaattttatgtgcagaaacagacagaaaatcaatgttcatgtccttaacatcaattttaattgtgcccattccctgaacattgtcaacatgaaaatatgcattggagtcctttaccattgccccgatttctttgagcggcataatggtaccaacttcattgttaacggccataatcgatactaaaatagtgtctggcgttaattccttttttaactgttctaaagaaatttgcccgttttcatcgacattcaaatagacaatgttgtagccctcattttccaaacgtttcattggattaagaaccgagggatgttcgatcggcgtagtaataatctttttaccaatatttttacgagcataggcagttccaagaatcgctgtattattgctttctgaaccacctgaagtaaaaataatctctccatcttgagcattaatatcttgagcaatctggtgacgagctcgatcaattacatttctggccctacgacctaattcataggtactagaggcattaccaaaatcatttttcatttcatcggtaataatatcaattaccttgggtgacattggtgtcgttgccgcattatctaaataaatttcacgcacgtttaattcatcttttctacataatcactaattaacttagctgccttagcgccgacttccttgacaaacttgtcaaaatcattgtctgcattagcatccccattatcggaaattgcacgcatagcaaccaacggagttttaaaatgacgagcaacttgtgcaaaagcggctccttccatttctactcctaaagcttctggaaagtttttcttgattaactctttttgttcttctgattgaacaaaagtatctccagtaacaacaagcccttccttaaaatctacgtcttcttcacctaaatatttcttaaatgcttccctttcaggcgaattcaacttaaaggtagcaggctctcttggaatctgaccttctacatattcaccggcactaacacagtgagcatcgtgataggcaaaatcatttactaaaatcacatctttacgatgaacatcatcttgtaatgatccagcagaaccagtcataaaaattacatcaattttttctttagttagtaaactagtcagattcatagcggcattcactttaccgataccacttaaacctaaatatacatcattgccattaacagaaaaatgttcgaattctgttgatccgaacatttcttttgtttctgcatggaaatgatcacgataaaattcagcttcttccgccattgggacgataatcgcaatcttcaatttatttcctcatttccactataaatgaaatagtgctaatagcaccaatataattaaaacaatcactatcaggatagcacgattcaatctttttttcagtcttaaagacttctcttggcgaatcgtttccttatcactcgattgattatgctgataaaattcttgtccatccccagccagagggcgtcttctaggttcttcttcagagtcatcccgcttaaagtcaggatttacatctacttcttctgaatcattatcagaaaaggaagattttagcttattaagtaggctttttttctgccttttacgataatcagagcgtttttctaccataactaatccttattatcggtctgagcattacgcaacatcatattctcccaaacagtaattgcataaattgtctttgcatcaacaatttttccttcagccaataaagtttttaattcatctaagctataccaactagaagttaaaaattcatctgcatccagtgcccgcttatcagtcaatttagttaaggtatcacaatagaaaagatacatcttttcatcacaaaaaccaggagaagaatagaattcactgaccttttcccagtaatctgtgcgatagccaccttcttcattcagctcacgcttcattgcatcaagcggacttgcatcagtggaatcaaccaaaccagctggaatttccaaagtaatctgcttaattggttcccgccattgctttactaacaacatcttttgttcatcattaattgcaataacagccgatgcaggcttatgcttaataacttctctagttgcagtttcaccattaggaagcttaattgtacgaacagccagatccaaaatacgtccttgaaaaatctgctgtgacgagatttctgtttcctttaaatccaaaatcccagctcctttttaggctaaataaacatttacacattgcagaccatttttaccttgagctaactgatatttaactctttgacctacttgcaaagttttatagccttcctctttaattgctttatagaagacaaaatatgacttatgattacgatcatcttcaataaagccatagctactgccttcatcaaattgttttacagtacctaaccgcattagttttcaaatccttcttgaacagcttctgggtaatctgcttcaacgattttagcacaacgaccacaaagcattggcaactttggatctacgccaatatcagttctaatcatccgacaacgaggacatacttcgccttcagcatgttcaactactacactagcattattcaattgctttgcattatcaggtgcttcaccatcagcaatagttaacttagatacaattagaatttgtctgaaatcagcatccaagtcttggagcattgccttagtttccttatctgggtaaatagttactgttgcttcaaacgatttaccaattaacttcttatttcttgcatcttctagagccttcaagacgtcatcacgcaacttcatgaatttaccccaattttcaagcaaatcatcatggttagcatattcttcaacttctggcatattagcaagttgaacgtaatcttcaggttctttcaagaagccccagatttcttccatagtgtgtggcaaaattggtgttaagatcttagccaatttaacagcagcgtcgtaaataacagtttgcattgagcgacgatcatggctgttttcaccatcaatgtaaagtacatccttagcaaaatcaagataaaatgcagaaagatcattagaaacaaagttgaagaccttcttgaagacagtagtaaaatcaaacttgtcgtaagcagcaagacagtctttaactaagtcatttaatttcacttccatgtattgatcaactgaacgaagatcagcataagcaacgcgattttcttttggatcaaaatcactagtgttggccaacatgtaacggaaggtatttctgatcttacggtaactttctgcagactgctgcaaaattcccattgagactgcaacatcagaagtagtatcagcttgagctacccaaagacgaataatttcagcacccatcttcttaattacatcgtttggtgaaattacattgccaagtgacttagacatcttgtgtcccttatcatcaagcacaaagccttgtgataatacttctttataaggtgccttaccagttactgcaacagacgtaatcaaactcgaattgaaccaaccacggtattggtcactaccttcaagataaagatcagctggatagtgtaaaccatcacgtttttccattacgcctgaccaagatgaaccagagtcgaaccaaacatcaagaatatctttttctttagtaaactcgccatttggtgaatgttctgaagtaaagccttctggcaacagttccttagctgtatgagtgtaccaagcatttgaaccttctttttcaaagatcttggcaatatggtcaatcgtttctggagtaacaattggggtaccgtcttctgcatagaagatcggcaatggtacaccccaagcacgctgacgagaaattacccagtcgccacgatctttaatcatgttgtaaagacgagtcttcccccatgaaggaataaagttagcttgttcaatttgatccagaatttgatctctaaacttagaaattgaagcaaaccattgagtagttgctctgaagacaacgggcttcttagtacgccaatcatgtgggtatgagtgagtaaagaagcttaacttgagcaaagcgccagcctttttaagcttatctgctaccaccttgttagcatcatcatagaacattcctacaagatctggatctggaatatctttagtaaagcgaccttgtgcgtccattggactgaagaccgggataccatacttttgaccaacacggtagtcatcttcaccaaaaccagtagcgttgtgaactaagccggtaccgtcatcatcagtaacataggtgtcattcattaccaaaccatattggcctacaccagtcttaccataaaggggatgcttataagtcatcccatcaaaatcagtaccttttaattgtttaagtactttgtagtccttccagcctaagtcttctgcaatggctggcaaacgatctgaaccaattacatacttcttaccgtcaacttctactaaggagtagtcaaatcttggattaacggtaatacccacgttacttggaatagtccaaggagtagtagtccaaattactaatgaaacatctgaatctaagatacctttaccatctttaattggaaaagcaacataaattctaggtgatttaatatcatggtattctacttcagcttcagctaaagtggattcacttgaccatgaccagtaaactggcttcaagcccttataaatataaccttttttatacatttctccaaagacgcgaatttcttgtgcttcaaagtcatgttgcaaggtaatatatggattatcccaatctgccataacgcctagacgcttaaagtcggccatttgcttttgaacttgttcttcagcatattgtcgacaaagctcgcgatacttagcacgatccattgtcttacggtcaacgccttgcttagctaattgttgttcaactggaagaccatgagtatcccaacctggtacatatggtgcataataaccgttcatattcttgtagcgaacaatgatgtctttagaaatcttgttcaacgcatgtcccatatgaatattaccattagcaaatggagggccatcatgtaaatcaaaacgaggcttaccttcgtttaactttaatctttgttcatataacttgttatcttcccattctttttgccattcagcttcacgaacaggtagattaccgcgcatcttaaatttagttttacctaaattaagggtatctttgattctcattaacaaaattcctttctaaaaaagaaagcctcatcctaaaattaggacgaggctaaccgtggtaccacctaaattgaacttattataagttccacttaactttgcgtaacgtgcaaataccgtttagattaattaggcagctgatcagctcttaggctcttatgctagtcttccaccatcactagctcgctgaattgccttcaagctttactgtcaatctaatatgcttattttttatagtcgtcaggaaaaacaattgttgggcctaaaggatctgatttcatttcaggcttaacattaattgtttcatgacttggactgtccccggtcattggtttaggtgcagcattttcttcattatctgcatcgtcagaatcatccggttgatccaactccaaatcatcagggccttgagaagagtttacgtcattttcatcatcattgtcaacatcttcatcttcaacgtcttcatcatcagcacttactggctccgaaccatcatctggataataacgctctaagttgaagtaatcatccaatgcatgttgccacttttcatcattcaaattatcgatttcagtctgtagcatttcttgaatattactacgaaattcactaacttgctcttttacacgcatataatccgtagaaatagtatcttgttgatgcttttggaagttaatattatcttccgcttgctttttggcatccgcaataatctgcttagcctctgcttctgctttctctctaatttcatcagcagtttgttgtgccgaaattaatgatttatttaaagaacgctttttttcgttatattcattaacttgatcttgataatcatctactttttcttgtaaatcagttaactttttatttaaagaaactacttcattcttcaagtcaaccacttgatcaagtgtatcaccataatcatcaacaatctgatctaagaagctatctacttcaagacgatcatatccattacgaccacgccgtttaaattccttgttgtgaatatccatcggggtcaattgtgtttctttgtctgccaaagtctgagcaccaccttatatttaccttttcttgtagtcgaaacatcctcaatcaaaatccgaccaaagtgtcttaaactcaagacatcgtcttctttaatcattatattagaatctgctatttcatgccaatttaatttaaccagctgactattaatcatcttttgaatttgaccgcggctttgtctgctaatacccgataatacagcatcaattcgcattgaggcaactattttcgttttttcaatcgaatcatcctcaggaaccaaaacttctttgaagctaatcggtctcagctttacttttgctctgccaatgcggtcaatttgctcttcaaaaaattccgtcatttcttttttagtgaaaaactgccattttccttgattatcattaataatatcgccaaaaatacttgtatcaatacccgaattcgccaaggtgcctaaaataacactatgatttattttagtaaatttttgcggatattcaatttcatacggctgaatctgataatcactcggtcgcagattaagccattcttcacttaaataaactcgctttttctctgcattaggatagccaccatactcttgaacaaatgcatcattaccaacaattgttcttaaaattgctcgttttcccggatccaaaaaatcagtcaaaattggctcatgcttaaaaatcagctgattaaaaagaccagtaaaatagtcaattactggtctttcctcttgattaaaatgtgggtaaaacttacttgcctgtctgcgttccattacaccatcatcctcaataaaatatcaaatatccatcttaaaacatagttttgaatgaaatataagataaataaagcaataattggcgagacatcaattccagttgaataagctaatctcgcaaatggaccttttcgaaacaaatttaaatatggatttacaaccttgtctaaaaagcgaccaacaacagaattacttagcattggtagccaactcataattgcatcaatcacgatcagcagactataaagccataaaatccacgtcagtgccaagtagattaaatttaatatattaaccattagcttaaattgtctttcttatccactaaatcactaattttgccatcagtaacaaactttggtggagttgctaaaaagattttatcaccaatacgttggatttcaccatttaatgcatatacagtacccgtgatgaaatcaacaatccgacgtgctgaactgtcttccattctgctaaaattaatcactactgctttattatttaataaattttgtgcaacatccttagcatcggaatatacccgtggttcatataaaacaatcttgcttttagccgaattcaagcctgatttaattgaaaccacattatcgcgattaactgagttcagaggcaagtcttcattttcatttttagtctgtgaggcatattcttcgtcattttctaattcatcatcattagaaattccgaaaaatcttcctaatttatcaaaagccatttatactacctccaaaactagttttcactacgatgtttaaaaaatggaatatcactgttatcatcactatcgtcctgagcgctagtttcaatttgagaaatactatcctggtcttcatcactaaaagtatcaaaaccctcataatctttcttaggctcagtaggttgggtatttcttctttgattgtcttcgctatcatttagtccccaaacactggttggatcaaccatcgtttgcttaggctgctcaggttcttgtttttcggcagcaggctgaactgtttgtggtcgatcaactggttgcttaggttcttcagccttaggagcttcttctttttctttaactggttgagccttaatttgttggctacgacctggtaattgcttagaagcagcttcttcagccttagaatcaattccagtagcgattacagttactaccacctcatcgcccaagttaggattaattgaagtaccgaaaataatgtttacatcgtcaccagcagccttagaaacaatctctgaagcatcttgagcctcaaataatgtaaggtcaggtccaccagtaatgttaagtaacacttgcttagcaccatcaatagaaacttctaataatggtgaagaaatcgccagcttagtagcttcaactgttctattttcaccgctagcacggccaattcccattaaagctgcaccttgattttccattacagtcttcacatcagcaaagtccaagtttacgtagtcagttgaagtaatcaaatcagaaataccttgaacaccttgcttcaagacattatcagcttccttgaaggcatccatcataggagtcttcttgtcaaccatttcaagcaaacgattgttagctataataaccaaagtatcaacatattgctttagctgagtaataccttctgcagcgtttttagagcgcttagggccttcaaaactgaatggacgtgtaactacgcctacagttaatgcgcccgtctcacgcgcaatttttgccactacaggagccgcaccagtaccggtaccgccacccataccagcagtaataaagatcatatctgcacccttaagtgcatcttcaatcgtttgttcactctcttctgcagctttttgtcctacttcaggatgtgaaccagcacccaacccacgggtcaacttaggccctagttgaatcttgttttcagctttgttgctgttcaaagcctgaacatcagtgtttgctgcaataaaagaaacaccttgtacgccatcgtcaatcattcggttaacagcattgccgccggcaccaccaacaccaattactttgatgacagcattcttattgtcgtctgaatcgaatgtaaaatccattaaattaaccacctttaatcaaagaatttcttaaagaaactcttcaagctattagttttttcttgcttagtattattttcatcgtctggcacagattctgttctggcagacattttgcttctattataagcttctttagcttcactttcactattagaagtcgtacttttagaaatcttggtactttttggctgagaaacggggtcttccacagcgggttcaccaaaaccatagattacgccattaacaagatagtcaacttcagacatcttatatgaatagtggacgataccataagcagctgtataaatcggattacgcataccaatttgatctggttcataaattcgggccttaacatttaacccattagcagtcagactatcaattccttgtaataggctactaccacctgtaatcacaataccacctggttgcttcaatgcattatgcttaactaaaccttttcctaaacgagtcaaaatttgttctaagcgtgcattaataatttcactaagatatacttcgtcaaccatttgctgactatttgcaccaacactattaatagcaaatttatcgttttttgaggcaaattgtggatccgcaaatccatagtccaacttaatttgttcagcatcctttttcgaaatacttaaaacagcagagatatcattagtaatatcgcttccgccttctaaatcgatgttggcatacttaatttggccatctttaataacagttgccgtacttacgccaccaccaagatcgataattaccgaaccaaaagttttttcactttcattcaatgctacacttgaaattgctaaaggcgttggcacaaagaaattattatgataaccggctctttcaatagccttcttgatattgtgcaaaggactagtaggtgcagttaataaaattccactaacacccaaggaacgtgcaatcatttttcttggatcatcaacttcagttttaccatcaatcaaaaagcgactcggcaaaaatgtaattgcttcacgatcatccttagctgctgaatgaatcgcagatctaatcgttctttttacatcatcattatttacttcttgcccttgttcaccaacattagcaaaaccagttgcagtttccagttgtaacatccctaccggaattcctgtaactacactataaatcttggcgtttgttttttctgctacaccttttaatgcacgactaattgcactagcagtttgatcaatatctactatttgaccgtgtcgcattcctgaatttggcgttgtaactgcaccgataaccttaccagaatctgcaacaacggcttttacacttgtggttcctatatctaaacccactaaaagatttgaattctccaaaattaagcccccattaatatttgccttgaaaaaattctaacataaataaacttgcaaaacagctacgatatgccataagctttcttttcactagaagttaatggtctactaaatgcacctatttctaaatcaataaggctatgtttaccagctttaattctaatagtatcataatattttagtttgctattcaaagtagcagtattgccaatcactacattaccgtccttcattactaaaataatttgtgaatttcgtctggtattcccacttaataattttacctgatttttaaatgaattaggtaaactgttaaataactttaaatcattttttaactcatctgatttattatagccaacaaaaataggtttatcttggttcacttttgtccaaggtagagctctcgtacctatttttccattatccaaaatctttcggtaagaataaccatcttttaagtaacccacggttttacgttcattaatttgtaaaatcaattgattaatatgacctaaatgaacttgtgcactttgaatttctggatatttttgggataatctttgactcaaatctttttgttgaaacaagtaatcaaaaactttatcgctagccttgatcttggataccttaacaatttctttagcaggtaaatgctctgcaccaattattttaacagtactgatattcgctaaaggtgaaatatagtatcctaaaccagctatcgccaaaactgaaaccgtcattatcagacctagcctacgtcgtaatgatcgtcgtctttctgcctgtaaatttgagagtgaggcagaaatcttggtctgcgattttcgactattcctttgttggttaaattcatgattcaagtacggagacaattctttccttggatcaatcttagttactggctttttggccatctgcctcacctacctcctagcgtgaaatttcttccatcaccttaatcacttgatcagatgcatcaggtacgcctaaagccttagaagctttgctcatttcagtagcatacttttcatcgagcaaaatatggtcaattgaagagacaaaattatttggatttaaatcatcttctggaataaccaatgctgcaccagctttttctaaatcaagcgcattcttcatttgatgattatgagttacattagggcttggaatcaaaataacgggtacacctaatgcagtaaattctgcaatacttgttgcaccagatcttgaaacaacacaagtcatttctggcaatagacctggcatgtttttaatgtatggcaaaactttaatattattaccaatatcaacattcttaattttttcttgtaccttatcaaaataaaaagtacctgttgcccaaataatttgatatggtttttgctttagcatcattaatgacttaagcataattctgttaattgctaatgctccacgggatccaccaaatactaaaacagttggcatttttggatttaatccccatgttttttcaagatcaattttttcttcgtgcaagcttaaaacttgttgtgaccgtggattacctgtcttaactagtttcttcttttctgagaattcctttgcagcatcatcaaatgtataacaaattttatccacataatgacccaaaaatttattagctaatccaaccactgaattagattcatgaatcattgttggaatatgcattttagctgcttcataaaccatagcaccgctaacgtaaccacctgtacctaaaatgacatctggtttaaagtcccgtaaaatttggcgtgcgcttttagtagcttgtaaaaatagcttgatagtctcaaagttttttaacggatgtttacggttaaagccttgaatcttaattgttttaaagttaacaccggctgctggaacaatttttgattccaatcctttttgtgtacctacaaataagatttcatcgtttttactaataccgcgttctttcaaacgttcaataattgccataattgggtaaatgtgaccgcctgtaccgccacctgtaaaaataactctcattttatttagtctttaattcctcaacaaatctaacaaagtaatcgccacgttcttcaaatgttctaaattgatcccaagaagcacatgctggtgagaacaatagtacatcgcctggttcaactaattcccaagcacgaggaacggcctcttgtagtgtattaacaattacaatgtccttaattcctgcttttctagctgcgtcagctaacaaatatctagtttcaccataaagaacaattgacttaacatgttttttaaataatggtaccaaatcatcaaaagtgaagccacggtctaacccaccagcaatcaatacttccggttgcttaaatgatggaatagctacagttgctgcttcaatattagttgacttagaatcattataaaccttgcagccatcaagtgttgttacatattgcaaacgatgcttagcgccagtaaaggtgctcaatactgcggcgatatcatcattatcagcgcccataattttagaaattgcaatagcgactaaactattttgcaaattatgaatacctggtaatttaatatcagaaatcttcataatcttttcgttttgactttcaagatattcatcgccaatgaaataatcagcattatgatctgtctcagaaaaagtttgcattttagctggtgaaacttctttttccttagccaaaatatctttttgatcataattagcaataaagtaatcattactgttttgcgttctagttacattcaactttgcattgacataattttcaaaagtcttgtgataatctaagtggacgttgttgtaaatatcaacgatcgctgcaactttaggatcaatatcagttacacccaaaagctggaaactagaaatttcaactactaaaatatcatccttagttgccttaggtacaacttcagaaatcggtacgccaatattaccaactgcataagcatgatgaccagatttttgcaaatgatggtccaaaattctttgtgtcagcattaccgtagtagtttttccatttgaaccagtcacacaaacatagggagcatcactacaacttaaggcaacttctggttcagtaataatcgggatattcaactcctcagctttttgaaccatcggattttcatagggaatacctggatttttaactaaataatcaaaatgttctttttcaagcaaatcaactggatgatgaccgccaattacgcgcacgccgcgacttttcaattcttgtgccttagcatttttctccaaatcagctttatcatttaaagttaaatttgctcctaattgcaaaaggagttcgctaacagcaaaaccacttttacccaagcctagaaccaaaatgtttttattattataagttttaatatccttcattttatgattatccccaaattactaaatacaaaatactgccaattaatccaactaaccagaagacaatatctactttccattctgaccaacccaacatttcaaagtggtgatggataggtgtcatcttaaaaatacgcttacccgtagtttggaaagaaattacttgtaaaattacactagcagtttcacaaacaaaaacaatcccaactaacaataatgaccagggacggttaagcataatactgattgttgctaaaccgccacctaaagcaagtgagccagcatcacccatgaaaattttagccggcttatggttaaaaataaagaaggcaattaaaccaccaattacactcatacaaaaggccaaaacagcaaaattcttttgtttgaatgcgatataggcatatgtaccatatgctacaactgataaacctgttgctaaaccatcaagaccatcggacaagttaacagcatttgaaaaaccaaccagccaaaaaataataaatgccacaaataaaactaagctatggacaaccccagcaaaaggaatatataacccaaattgaaaatgatcacttgtagcaatcaagacaattaaaattgcaattataatctgtaatgctaatttttgccatgcacgcaagcctaaattacgtttgaagtaaagcttaataccatcatcaaggaaaccgataataccgtagcctaagagactgattaccaaaatccaaacaactttattcaagctgtgctgcatagcagctacccaaataacagaaataactgctgcaattacaaaaacggtcccacccattgtaggtgtgccagactttttttgatgccatttaggaccttcatcacgaatttcttgtccttcgtgatgtgaccgcataaatttaatcaacaatggaataaagatcactgtcaaaaccagtgaactaactagggcaatacaacttgccaacatcatattcattctgagttactcctttaacttaatgtttaattttcttccagcttttaattctgttcctttagccacgctttgactcgcaacagtgccggtaccttttatgcttaacttaatatctgtcaaactagcaaattggtgtaaatcactataagtccatcccgtcatatcaggacaaatgatttttcctgaagtattgacaaaaatcttagacccagactctaacttttcgccactcttaactccttgattgctaatccgatcaccgctaccaattttaaccaaattaagtcctaattgcttagtttgactttcagcttgtgcaacggttttagcttttaagtttggtacttttacagtagttgatacatcatcatttttagcaatcgaaatgattctctgcatcatcggtttgaaaattgaagccaaaatcttttcagctccgcctccaattaagtgtggttgcttaattgtcaaataaatacagtaacgtggtttacttgctggataaataccaacaacagagaaaatataattactatcaccctttagataacctccacctttagggttagcaatctgcgcagtccccgtcttaacagcaatatcggcgtttcccatcttataagcagaaccagttcctgattgcttattaagtacctttctcatgttagccacaattacttttctggttttagcactatatactggagtaccaacttttttaatctgatagccttgaattgtattgccatcagagtcagtaattttattaaccaactgtggctttaccatttgaccattattagccaaagaactataagcttgcatcatttgcattacattcacagtaacgccttgaccaaaagcagtaattgcttggtcaactggtgttttaaacgaaatcatccccggctgctcacctggaagactgactcccgtcttttcaccaattctgaacttcctcaagtacttcttccaagtcttagcacccatcttttgttctaacttaacaaaaccagtgttacttgaacgttcaaaagcttgagaaaatggaattgtgccccaacctgaagtcagccagtcatggatagtcgaaccagcaatattaacagaaccagaccggtaatactcattagggttgtaattgccactgttgactactgcagcgaatgacaaaatcttgaaaactgatcctggttcataagtatcttggaccaagatatcccgatacgacttagttaatcccttcatagtttgaggattaaaagtagggcgttgagaagttgccaaaattttcccagtcttcatgtcttcaactgtagcagtaattgatgttggtcggtaagttttctgtacttcacttaagcgagtctcaagcaaactctgcaactgagaatctagtgttaaatacaagttgtttccatttttagcaggcttataaacctgattactatttggaagctgatattcagatgcatctaccgaagaaatccggtaaccatctgtcccagtcaaagtcttattgaaataggcttcaattcccatagttccgactaagttttgtgcattagtctttttattccaaattggttgagccaatccaacagtatgtgatgcaaaaacaccattgggatacaatctagatggtgtttccaagaacttaattcctggtaatttcattgcttcaatctttttcttttgccgcaatgtcagtccactaccacctgtcccaaattgtacctgaaagaccttctttttgggggttaaatattggtaaattttttccgcagacaatggtaaaacctgtgccagcttttcagctgtcttggttttattcactacatactcaggtttattcttatagttgatcgaagtcttatctaaaatcgcataaaccgtatacaaatgcgaatcttccgcaattgttaatccatttcgatcatagatagtccctcgcgtggccttaattacctgattgcgcttataaagctgcttggtacgctgtgataaattttgaccattaactgtcttggatattccgatatataaaaatctagccgtaaatacaagaaaaaccaaagccacggccatttggagaaatctccccaccgtaaagcggtagccgtgggctttggatttttgtaattttaaattactgttttttttcattaacgaatcgtcctaatatttttgttaattagagttaatcctttttcacgtgcaattttatttaaacgtgaagtagaggtcaactccccaatctcttgacgtaaatcggtaatcttattctgttccttagcaactgtttgttgagttctagtcaattcatgttgagccgaagttgcagaaatactagaagaaactagaaagatcatcatgcccaacgtaatgacgcttccaataatcatcaaagctttttctatgccactataaggaactttacgcggatcaaggataattcgttgtcgtctttgcgaaccatttctactacttggttcatattcaatttttcttgctgagctatcagccataacattttcctctttataacttctctgcaacccgtagttttgcactgtgtgagcggttgttgttctctaactcagaagtagaggctacaattggtttgtgatttaccaaacgtagcgttggcttcataccgtccggtataaatggcattcctcttggcacctcaacttctgaatacttcttaaaaatccttttaacgatcttgtcttcatgagactgaaacgtaattacactgattcgaccacctggacgcaatatcttaattgcttcctctagcgaagcttgtaaaacatcaagttcgtgattaacagcgacccgcaaagcttgaaaactcttctttgccgggtgccctccagtccttcgtgcatacgcaggaatcgcatctttaatcacatcaactaattcaaaagttgttgcaattggcttttcccgtcgtctttctacgattctgtgagcaatttgacgagaaaacttttcatcgccatattgatacaaaatatctgccagttctttttgacttaaagtattaactaactgataagcatctaagtcctgactttgatccatcctcatatctaatcgcgcatcataacgatatgaaaaaccgcgatctgcttgatcaaattgaggggaagatacacctaggtcatagtaaatgccatctattccatctgagtaacccagttttaccaggtccttttccagattactaaagttgtcatgtaccaattctaaccttggctcactatccagttgtaataaattcgcaaagttcaacttcgccgattttatcgcatattcatcttggtcaaaacctacaagcgtaccggtgtcaattttgctgagcaaatatttagcatgtccaccaccgccaaaagttgcatctacataaagaccaccgttttttggtttcaaattgtcgatagtttcgtgtaagagtacactggtgtgtttgaatttcatattttttatagttcaatgtcgtccaaattttcagcaatatcatcatagtcttcgttagcttcttcttcaaaactagtccaacgttcttttgaccaaatttcaattcgatcagagacaccaatgatgacacattctttaatgagtttggcatgcattttcaacgttgttgtcagattaacgcgaccttgcttatcaaactcacattccatcgcaccagagtagaataaacgcataaatttacgtgtattcctcttagtcaacggaagttttgctaatttagcttcaatcttcgaccactcctccatcgagtagccaaaaatgcagccttccattcctcgcgtgaatatcatcttgtcgccaatctgatcgcgaagtttcgctggtataatcaggcgacccttgctatcaagattgtggtgatattcacccatgaacatggtctagcccccttccactaaataatttaccacaattccccactctctaccacattcataagaaaaaaatacagatttttaaatttcttttttattgtgatttttcaaaataaaaaaaagtcacaaaatattgaaattttgcgacttaagcatatacaagtaattttattttataacactagcatcaataaaagtccgatataccagaaaacagtacaggcagtcaaataatcccataattttctaactgtttttcctaaagaaatatttttatttctaatcgcatcgttcagcgacacaacaatcactaatacaaaatagcataaaaaaccataaggtaaaaaagaaggtttattcatatgtaaagtaattaatccacaagctgaaagaaagaaaaatggcataacatcgtaccctctaaactgtgctttagggaaaattttattgataaaaaaagcaactactaagccaataattggaattaggaaaatataaagcataagtattcctccattctttttattctaaactataattgatttgaaaaaaaccgttaataagcataaaatattgttcaaataggagggctgtttatggcacgaaaaaagaaaaagaaatcaggttttcaaaaattaactattgcaatggcttggatcatggcaattattactttagcagctgttattgctcaagctgctatctcacttcaaagtttttaaggattaaaaagacgcgaaagaaaaaatcttccgcgtcttttttaaactcgataagcgtttaaatcaattaagaatggataatcctgagctaaattgccccaaatccaatacaagagaaaaaagaagacaactgcccaacctaaactgactaaaatgctcattaataatacgtgtgctgatgcagcactaatacccaccatattaaaaatgagccaactatacgcaacaaaaactgcagttcctaataaaacgacaattaatctagcccataacatttccggtaaaaaacgagctgttttttgacagatccagcaacttgcaggtaggaaaactgtataaacaccgataatgccataaaaatagatatcagcaacaattcctgcacctaatgctaaccaaatttcattatcattagtatcatcaaacagaccaatcaacattacactgattggcaaaatgacgcttgacgctgcaaagttgtcataagtcataaactgatgtaagtaaagtgcacatacaccgtctactaccaatgcaataaataagccaattgccaaaacccattttcgaaacgtagacattaattagccacctgtctttcaattacagttacaacagatggatcactaatatcacctgctggtttaattctaatctgatcagatagaccaaatgaatcacgagttgtcgtagtaactgtaccaattaacaagccttttggtgagttaccgcccataccactagtatatactctcgtgccggccttcagtttgcgaccatcaaccacctgtgtaaaggcaagataattattggaagtaactgtaataataccatgtactgtttttccattcgcagcatccgcttgaacagagaagcgattagccgactcatcagtagtagtaagtaattcaaccttggaagaagcagcatttgcttctacaattcgaccaataacaccgccatcgcacatgacagccatattctttttaattccagctgaacttcctttattaatcactaataaatctgaccatgtatcaggcgaccgagaaataacagaggcgttgaccatggtatagccacttaacgtatcttttaatttcaatgcagacttcaattgcctattttctttttcaagagctgaattgcgagccttcgtctggcctaaattagtaacttctcgctttagatgattgttttcttcttgcgtatttaaaatatcatgaacactatttaatccgcctgacacgagccctactggtacatcaacaattctagtacctaaagcaacgacatcgttacccaagctttgaatcagtaaaggtgtattgcgcctattgcgcaagctaacactcccacccaaaacggataaaataacaactactataataaatgctgataataactttttattttgcagaaattttttcattaagaattgatcctatagaaaaaccggcaacagccggcttttttattatttgcgacttctacgcattacttcaatattcttgagtgattcaccagtaccaattgctacacaatcaagtggatcttgagcaataaacacaggaaccttagttgcttcagaaataacttctggcaaattcttcaagagtgcaccaccaccggttaaaacaataccatgatcaataacatcggcagcaatttctggtgaagtttgttccaaagtctccttaatagctacgataatgtcttgaactacatcttgaatagccttggcaacatcaactgcttcaatatcaacagattttggtaaaccagttactaaatcacgaccacgaatattcattgattcaatttctttagccttttcaactgaagctgaaccaatttgaattttaatgtcttctgcagttctttcaccgattaataagttaaagtttgagtgaacatagttaacaatcgcattattaaacttatcaccggcttgacgaattgaagttgatgaaacgattccacctaatgaaattgtagcaacatcagtagtaccaccaccgatatcaacaaccattgaaccagtagggtccataactggaagaccagcaccgattgcagctgcaaatggttcttcaattacaaatgcttcacgagcacctgcaactctagctgcatcaattacggcacgcttttcaacttcagtaacacctgaaggaacacataccattactgaaggcttggaattaccaacagtcttttccataaaatatttaagcattgctgcagtagtatcgtaatcagcgattacaccgtccttcattggacgaatagctacaatgctgcctggtgttctaccaatcatttcttttgcttctgaaccaacggcgattacttcgcctgtttgtgtattctttgctactactgaaggttctctaagaacaatgcccttaccttccatataaacaagtgtattggctgtacctaaatcgataccaatattctttgtacctaatccaaacacaaaaatctctccttaactgttgcggtctctaaatcttgactaattatagcatactataactttaaaggcgcctttcacacaaattttaaagaactttaaaacaatttttctcacgcaaacttaaatattgaccttctcccacgataaaatggtctaagaaatcaattttcatcatttttgcagcttgacgtaaactttcagttaattccaagtcacttgcagatggcgttaatttaccactaggatgattatgagcaataaaaattccagagcagccataaataactgcccaccgaaaaatttcccgcggatgagcaattgatctattcaaagtcccttgaaatagtttcttctcagcaataatgtggttgctattgtcaatatacaatgcccacaattcttcctgcttgtgtcctatcagcttatcagctaaatacgtacctacttcaatgctagatgtcaaaattgtctttctcttaggtgaagcgcagcgcaaacgatctagtactgcctcagccgtaatagcaagttcatccgagcattctgaactggtaataaactttaatagatcattaaacgaatttaaccctgtgtttttcagaaaaacatttaagtcctgcaacgtatgaattcctttattttctagttgttcaaataattgtgtcaatagctctaaatctgttttgacaaagtaatgatttggttttctttttaacataaaatccccctcattacttattacgcaaaaaagagctaaatttttttcagaaattcaaaaaagttttgacaaatcatcgttgcattctgcttatctttaacagatggtgctttcaaatctggtaccatcacacattttaaccctgcattagcagctgcttgaacaccggttgatgaatcttcaaaaactaaaatattttctttaggtaaattcattttcttagctgcttctagataaatatctggtgccggcttagccttaatgtgacctctttgtacatcaagataactaagatgaaaatcaaaataatttctgattccagtcacccacatagcatgctgaactacattttcataattacttgaagcaatcgccatcttcaagccacgcttttcaaattcgtctaatgcttcttgaacaccaggttgcagctttaactttccctcatcagtccattgccacaccaagtcatcagttcgcttaataaaacgatcacggtctgcttcagttttaaaatatttatgataaaaatcctgcatctctttaactgtagcaccagttaacttgagataagcatcccgcggcgtgcccaaattctcttcttctgccgcctgaatattagcatcccaatacagcttctctgaattaactagcaaaccgtccatatcaaagataatgccttgaatatcatcatctagcccttgtacgcgcatcacgttttcctttccaatttaaaatagcactaaccaaataaaaggatccactaacaattaaaatatcattagctcccaagtgatctcgcagctgggtaaaagcagctcgataatctttttcataattatatcttttttgtacatcaattggaaaatcatcttttttagctactcgcggataagataaagttgtcagtaaaacttcatctttatcatcaaacaagctaaacacctgctcaagatccttatctttcatcatagtcactaaagcataaagcttgccatgcttttgctgggtcatacgatgaacgactgccagcaaattactcattgcctgaatattatgtgctccatctaaaatgattagcggattttctcgtaaaatttgatagcgccctggaataatcgtttgattaatcgctgtttcaacttcttcatttgataaaggcagtttcaacaaaaagaacgcctggcaggcaacggcaatatcataggcttcaacttgtggtcgtaaagcaaaaactagctttcttttgtgatcttgataaacaatttgattatcaagcaaaacactaaagtctcgtcctaattgataaactatcgcatgttcttcttcggctttacttttcaaaattggccaaacaacttctggcacgttacctaaaactactggtctttttgccttaataatgccgcttttctcacgtgcaatatcctgaattgtaggtccaataattttttcatgatcgagaccaattgtagtaataacacttacttctggcataattacattagtcttgtcatgttctccaccaattcctacctcgataacagcataatcacactttttttgagcaaaatagacgaaagccagtgcgacttcatattcaaaggttactaacgaaaaagttgagtcctgctgctgcaatttctcataagtaccctgcacaatattagctgttttaactaaatcctgatcactaatattttgattatttaactgtattctctcattaaattcatagacatacggtgagacaaaaaggccagtcttttgaccagccttttttagtaggtttgataaatagtatgaagttgaacctttaccattagtgcccgtaatgtgaatcgttttaactagatcttgaggattgcctaattccaacaataaccgcttaataaaagacaaattatttttaggatgtaaatgaggcaaagcatataagtaatcgattacttcttgagctttagtaaatttcaattatttactctctttcaaatcttgaattctttcacgaacaccggctaattgactttcgtagtcagccttcttttccttttccttgttgacaacagcttctggagcgtgaccaacaaagcctttgttagccagcttcttttcacaacgagcaacttcgtcttcaagacgcttttcttctttttccatcttttctagctcatcgtcaacattaacaagttcagttaatggaacaaaaatttgtgcgcctggaattacagcagtcttagctaattttggtgcttcaacttcactagctacagtcaattcctttggatgtaagaagttttcaacgtaatcagcattttcgtccaaaacgcgcttgttagcttcatcgtctaattgaatcatgatgtcgatttgacttgacattggtgcattaacttccatgcggatgttacgtactgctttaatagtttcaattaagaaggccatgtcttgatctgcttgcttgttttcaaattccttgtgagtagttggatattcagcaaccataactgacttaccttcatgtggcattgaaagccataatttttcagttacaaatggcataattgggtgaagcaaacgcaagatttggtcaagaatccaaattaagttttcttgctttcttgcctttaattcttcatcgtcaccattcaaagcaaccttagaaatttcaatataccagtcacagaagtcattccaaataaagttgtaagcttcacgaccagcttcaccgaattgatattcatcaaacaagcgagttacttcactaacagtatgattcaagcgatcgaaaatccaacgatctgataaatcaaatttagaagcatctggcatatgagctggtttagcatctgctggcaagttcatgattacaaaacgacttgcattccaaatcttgttaatgaagttccaagcagcagataatttcttaggatcataacgagtatcttgaccaggagcagtaccattaagcaagaaccaacgaagggcgtcggcaccgtatttatcaactacatccattgggtcaacaccgttaccaagtgatttactcatcttgcgaccttgttcatcacgcattaaaccgtgtaaaacaacatcattaaatggacgcttgccagtaaagtgcaaactttggaacatcattcttgatacccagaagaagataatatcgtaaccagttaccaaggcattagttgggaagtagcgcttaaagtcttccgcattagtatcaggccaacctaaagttgaaaatggccataatgcacttgagaaccaagtgtcaagtacgtctggatcttgttcccagttttcaatgtccttaggtgtttcttcacctacataagtttcaccagttttcttattgtaccaagctggaattcggtgcccccaccacaattgacgtgaaatacaccagtcgtgaacatcttccatccagtgatcaagagtttgttcaaatcgttctggaacaaagtttactttgccatcagtcttttgattttccaaaactttgtcagcaagtggcttcatcttaacaaaccattgcttagaaagacgtggttcaacttgaacgccagaacgttctgagtgacctactgagtgaacaattggttctatcttaatcaagtaaccttcttctttaagatccttaactaaggcttcacggcattcaaaacgatccataccagcatacttgccagcttcttcgttcatcgtaccatcatcgttcataacattgattctttcaagattatgacggttaccgacttggaagtcgttagggtcgtgagctggagtaatcttaactaaaccagttccgaattctggatcaacgtgttggtcttcgataattggaatgtgacgaccaacaagtggcaagatcaattctttgccaacaatatccttgtagcgcttatcaccaggtgctaccgcaacggcagtatcaccaaacatcgtttcaggacgagtagtagcaatttctacataacctgaaccatctgcaaatggatacttaatatggtaaaaggcacccttatcatctttgtgaataacttcgatatcacttaaagcggtttgaagtgctggatcccagttgatgatgtattcaccacgataaattaagccttcattgtaaagctgaacaaaaacctttttaacagctttagaaagacccttgtctaaagtaaatctctctcttgaataatcaagtgaaagccccatcttagcccattgacctttgatgattgatgcgtattcatctttccaatcccaaacctgtttaacaaaagcttcacgtcccatttggtgacggtctttgccttgtttacgcaattttgcttcgaccttagcttgggtagcaataccagcatggtccataccaggaaggtaaagagtatcatagccttgcatccgcttaaaacgaattaaagtatcttgaattgcagtatcccaagcgtgacccaagtgcaacttaccagttacatttggtggtggaataacaattgaatatgggtgagcttttttgttacctgatggcttaaataaatcttcatcaagccaggtttgatatctacctttttcaacctcgtttgggttgtatttaggtgctaaatctgtcataaaattcctccaataaaaaagtcctagacatattgtctaggacgatcagttaaaccgcggtaccacctacgttaagcatgtatcaaacatgcttctcttgaagacgataacggcgtataccggattaacctactttttattttcaattaatcagctaatcaagctactagtcaaccttcggcctctcagctgtctggcttttctctgttaataaagtcgacccctcttgattcttgctttggttatgattatagcatgaacttcactcagaaaaaagggttaggaattagtcgtaattaagttagccatatgtctttattcttttaataaatcagcaatacatttttccgatgaatgatattgcttatattgaaactgtcaaatcttttgtgtaaatagttctttctcgtaaattgattttttaattatttatttaatcaaagtaggattctaaggtgtcctgaacctgaccaaagcctttatgaattcgattgaaataacggtcattgtagctcattgcctgaatgccaataaaagcatcaagcgactgttcagttggaaactctgccttaggcttagctttgcgcttgatcacattgttaaatgattcaatcatgttagtcgaataaattgaagctctgatctgcttgggatagttataaaagaccagcagatctggttctatgtctttcaagcttctgataacatggctgtaaaccttgccccatttggtatagaagtcatgcaggacagctgtggcttcttctttgtttgtctgttgatgcacctgtttgaattcgttcatgatcttttcacgatcgtcgacgcgtactttagcgcagatattgcgcatgacatgaaccaaacagcgttgaaaatgagctttaggataagtcctggccaaggctgttttcatgccaacaacaccatcagaaagaaaaagctcaacttgctttaagcctcgggatttcatgttttgaagcatatctgtccagacttcaatgttctcgctaggtgcaatgcagtagtcaatgacctccttgtgcccattaggcttgatgccaatggcaatatagactgcttcacgctcaaatgtttctcggcgcaaaggaaggtatgtcgcatccaaatagacgcagaaaaacttgtcgcttagcttgcgtttgtggtaagcctcaacctttggaatcatctgcttggaaatatttgatacctgagctggactgtaatggctgccatacatcttttcaattagatcggctatttccctggtggtcacgcccttggagtaaagcttgataatcatgctttccaagatatccgagtgctgcttgtagtcaggcagcgtgtgctgatgaaattgaccgttgcgatcccgaggcacttgcacttcaattgggccaaattgcgtatcaactttgcggaaataagcaccatttctagagttgccagtattccagccatttctggcatagggatcatagcccagaaaggcagtcaattcagcttctaacaagttattaacagcctgttgtagctctttgcgcaataaatcatttattttgtctggattgaatagagcttgagcaaaatctttggtaaaatcattcatgaaggagttcttctttctgtatgtgtttttttgttcaaaccaatcatacgagaaaggaactcctttttctaatgtttaaagaaataaatttaaggaatcattcatccttacacaaactattttacagtctccttatattgttttaacacgttgattaaatcatcatagtgactattccaaaaataataattttcatcataagatttcacactcttaagatcgttataatactgcttaacaaaatcactaggcttcactttacttttatagttatttgtatatcgctgatagtcttgatgataaagaatgtctagaatttcaatctcaggtctagtacgaagttctactacttcggatactttctttttatacacttctggaagattaaacttttcggttttggaatcaagtatcctataaattttaacctttctacttctaaaccctttattcaaaaattctttagcaaactttttagcatttcgtgctctaattacttcaccttcaagaagatcatcctcgttgaattttagtgcatcgtgttccaatagaacttccataattgctcgttcagtatgaccttctacaataatagcgattagatctgtagagttactcatccattttaaccgccttttctgtagccttctttaaagccatgtaggcatcataatctggagctgtcccacctaaataatctgattcaaaaacatcggctttatttagatcgcttcttacatcagcagttgaatatctttgaagctgaatcttgccttctctcttagtaatatattcttcatcagttctttcaattttatccaaaatttcagtatagtgcgtactaaataccaaagtagctctatttatgttgattttaggattagtaaaatactcaataaaagaatctacaatagcgtgattaaagtgattctccaactcatcaataaagatgatgccaccaacggaaagtgcattaattacctcgccataaagagttatccctttagctgtaccagaagacaagtattttgcaatcgttgtaaaatcattttctgcaatctctgtatctttccctttaaacttcagcttaaacaattgtttagtagcaccagagccctcaggcttgttttcaattttaagatattcaattgttggatctaaaaagtttaaaatttctccaggcacattgccagaaccatacatcaatgcattaaagtcagtaaagaacaaagtatcaaatggtatttgaggataatacttatttttcgaaataatcgctctaaaaatcgaatcatcagacgacaaaattgaagaagctaggtcgcctaattcttttctgtctaattctggttttatatttttgaaatcaaataattttttctttgaaagattaacagttaccttttttcgatataccgtttcagactcaatatgccagcttttacttaaagttttctttaacttgaaaactaaactatccttataaactacatgatcagttccataaaaataagttgtaacactaataggctcatttcctattagcacatccgttagcttagtttgatcaattgacttttccatcacaactgtttgaagaattcctatcaagagtttcatgatcgtagtctttccagtagcattagtccctactagagtgattaaattattcacccataaactgccgagcaaatgagttaatcgatcagaggtattagaagtaacccttgcatcactgaccagtgaaaattcaagatcatcctcaaatagcggatgattttgaatttctaattttaaaaagtataatttatttttattcataattattcacctaaaattgttttattcaggctaaattttatcatatttttgcattttatacataaaatctgtttaaaatataaataatcctcatcaagtagttactacttcatgaggattatctaaaatattctactttctaatcatcttaactgcttgaatcaaaatcgttggaatcagagccaagccagcaagccacattacttcttgcccagttaacggagtaactgcaaacaagctatgtaacgccggtacaaacaaaatcaaggctaacaaaattgttccgacagcaaatgctgctaaactgtaccagttatttttgaaaccgatcttgaagatactgtgttgtgaacgacaattgaagccatgtaaaagccgagcaaatgtcaatgttgagaacgccatcgtcgttgcaactgcaggactatcttttagtccgatcaaaaaggcagcaattacactaatcgaaatcaacaaaccttgaatagtaatttgactcacaaaggctttgtccaaaataccagccttaggatcacgtggcttacgtttcaaaatatctggatcacctggctccattccaattgctaaagctggaagcgaatcagttaccaagttaataaagagcaattgaaccgctacaaatggtactggtaagccagcgagtgaagcaaataaaacagtgataattgctgaaaggttacctgataacaagtagccaatagcgtttttaatattttcataaactgttctaccgttagcaacagctttgataattgtggcaaaattatcatcggccaaaatcatgctggcagcatctttagatacttcagtaccagtaatccccatcgcgacaccaacatcggccttcttcaaggctggtgcatcgttaacaccgtcaccgatcattgatacgatacgatcttttctctgccatgcattaacaattctgatcttgttttcaggcgatacacgagcataaaccgaaatcttctcaatgttttgatcaagttcttcatcgctcaaagcatctaattcaaggccagttaaagccatgtcaccttcattgaaaataccaattttcttagcaattgcaacggcagtcaccttatggtcaccagtaatcatcacagtcctaatcccggcttccttagcacgagcaactgcagctacactttcttcacgtggtggatccatttctgaaacaaggccaataaaagttaagccatcttctgcttcagtagaaagctcttcatcactttctttataagcaaaagccaaaacacgcaaaccattttctgaaaagtaattgttttgtgccaaaatttctttacgatcttcttcagtcattggacgaatttcatcgccgaaacgaatattgacacagcgtttcaagagcacatcaattgcacctttaacaaaaatagttggtacagtatgaatcaaatgcttagtactcatcagcttacgatctgagtcaaatggtacttcttccagacgcttagaatgttcgcgtaattcttgttctgataagcctaaaacaccattacctaagtcaattccgggcacttgacgatacatttccagcaaggctgactcagtcggatcaccaattgccttatcttcggccaaacttgcatcgttgttaagcactacatcataaagcaagtagcggtgaagttgattactcaaatccagctcatttggctttaaaactttaccaccaatatagatgtcctcaacagtcatcttattttgagttaacgtaccagtcttatctgaacaaattactgatacagaccctaaagattctacggctgccaagtttttaataatagcattttctttagccattttttgcgtacccattgcttgcacaatagttacgatagaactcaaagcttcaggaattgcagcaacagctaaagctactgcaaatagcagtgaatcaagcagcggttgaccacgccacatttgaataccaaagatcacagcacacaagattaaaatagcagtagccaatcgtgatgaaaactggtcaagtgatacttgcagcggagtgcgacgttccttagtttcattcatcaaggaagcaatcttaccaatttcagtctgcatccccgttgccgttaccacaaccgtagcacgcccataagttactaaggaactggagtaaaccatgttaacccgatcagctagcggcacttctttttcaaaatcagtgtccaacttgtcaacattagtcgattcaccagttaatgaactttcgttgacttgcagagaataattttctaaaattcgaccatctgcagtaactaagtcacctgcttctaacaaaagaatgtcgccaggtaccaagtccttggcctcaatctccattttttggccattacgcaaaactttagccgttggcgcagataatgactttagcgattctagcgacttttccgccttaacatgttgtaccgtacccaaaatcgcattcagaatcaatacaacaataattaccaacgtactttccagactgcccgtaaaagcagaaattattgccgcgataattaggatgatcaccattaagtctttaaattgttctaaaaagacctgaaaagtaattttcttctttccttcaactaaagcatttggaccaacttgagctaatttctcttgagcctctttagcgctcagcccctgctttaaatcggtatttaactctttagctatctcgtcttttttctgacgatagtattccatgtaaagccctccctaaacataagagtaatttaagcaaaaaaatagagactactggctaaaacactgtttagtcaatagtctcatcatttaaacttacagcggaaaataaatttcgttctgacgccgtaaatacaatttatgccgattactccctatttacttgtacataattaaaccatatcaagtaggtagttggcaagctattttaactttcttttaggaagttttctaattgttcatcggtaaaatcagaaccgtaattttgttcaaggagatgcatgatctcttgcttggtattaccagttcttttaagtgaagaaactaaaattttgacgcctcgtttaagtccctcttctttaccttcctcacgtgcgtcttgttctcgctccagtattttctcttcgtagtccatgatataatcactccattccgagcaataagataatcatttgtacttcttatctttcaataatccgttagcaatatcagccgaactaactggtacaccgactaaacgctcatttttccacaaatcaaaaaaatcagctggcatcatttgatcaaattcatcatctgaattcattaaatccttataaacacgtgacttctcaaataaatttagagcctgcttaggataaatgtttaatctcttagcaattaagtcgctaattgcttcagctagttgctgatgaaattgcttttcactaatttcgggaatcatctaaccaactccttatctatgaacgttaaagctttgagagctctttctgtcttgaaacaatactgctccgaataaacactcggttttaattttagcagagcctcatctaaatctagattaccatgtttccagcaattaacaacagaaaaaagtttaccatctgctgttgggccaatgacgatatcagaattatcttttatattattcattctattttgaatgacaaacttaatccaatcaatatctgcttggtaaactaatattttcaagtcgggttgatcagcatcgaatacatatctatttaatgtcggttgacctgaatatctagccttacgctttgcccatttttctgcttgtctacgattagcagtcacataaaagccattaccaaaatcagttgtaaaaacatttttatttatacgaggctgataaacagcctgattgcttccatgatacaaaatgactttggtattgcttttcatgaatcgtgatgtatgcgtatttttcatcgcgcacctctttcataaatagtaggacaaaattatcctccactatttattacgcaaaaaagcacgatttttttgtgagaaattaaaataaaaaaagaaaatgcctgagaattatatcccagacattcaccaatttacggctctttctcatttctcttccttcacaatataaattggtcgttctttaacttgtaaatagattttaccaatataacggccaataattccgatacacaaaagctgcaaaccgccaatcaataaaataattgaaattgtgctggcccagcccaaaatacttgaaccaggaactattagtttacgaacaattacaaaaataagaccaataattgacaaaatgaatgaagttatcccaatccaaacagctaagttaagcggtgcttgagaaaaatcagcaatcccgcccaacgcatatttgaataatttgtgagtcgtccaatcagtttcaccagctacgcgctcgacattgtggtactcaagatacttagtcttaaaaccaacccaagcaaaaatacctttagaaaagcggctgtattctttcattgataaaactgcgttaaccatctgcctggtcatcatgcgatagtcgcgtacgcctgaaacaatttccactttagaaatgcgattaatcaccttataaaattgattgctcaagaaagacttaaacttaccttcccctttacgatctactcgtctgcagccaactgcatcatagtcaccagtctgcaaaattttatacatttttggtaaaagtgaaggcggatcttgcaaatctacatccattaagacaatataatctcccgttgcagctgataggcccgcatagatagcggattccttaccaaagttacgagaaaaagaaatatagtgaacatgtttgtcctgctcatgcaattttttcaattcggtcagtgtgttatcattggagccatcatctacaaaccaatattcgggcgtcactttgggcattttagctaatactttttgcactgctggataaaaaagtggaattgtttcttgttcattaaaacaaggaaccacaattgataatttttccattagatttcttctttcttagcttttctaaaagtaactactttattaattacaaattgaattaaagttgctacaaaagttgctactattttaacgattaagtgcggataacccaatttagtaacgaaaataaatagggaaaccgtagtaaataccgtggtaatctgaccaacgataaaataagaaataaatcttaatatcatgcgatcatgaactttaaagttagtataagaattccataaaaagttattgatgatcccgcaggtagacgaaataatgttagctatttcaacattcatcttgaaatgcgtcaaaattgtataaattccaaaatcaacgactagccctaatacgccaattagaacatactttactaattgaacaaaatcttctgaatagattgctgttttgattttttccataattattcctaataaaaaatccagacaagaggtcctggatttcaacatatttaactaatatggtcttaattatatcattgtttttaagctctacgttttcattattaaagttaaaactttaataggaacaccttttgcattaattataatttttgtcattcaatctatctgtcttgttagtatcctcatacaaatgataggaactcttaatcttatgcctgccttgtggatcaaacatgcagagaaagataacatagcaacactttaaattttgatatgtgctgcatttcaaaatcatacagatttccatcaacatcctcaaccaaaatatcgagaataacagctttttgcttagggtgtttgggatcagcgacctttctctgcttctgcagataatgaatatctctaatctcaatctccggcaccagtccctgtaggacatgcttgcaaaaattcttgttagacataatctcaccaaagattacatcctctgtgaagccaaaccagggcttctttttcttgtgcgtattttccattgcgcacctctttcataaatagtaggacagaattatcttccactatttattacgcaaaaaagtgcaatttttttgtgagaaattgaagttttttaaagttttacccaactatatcttccaacttcaattccagatattctccccgctttaagttagcaggcaagcttaactttcccatcgaaattcgctctagctcaacgactttcatccctaccgcaccaaacatacgcttgatctggtgatatttaccttcacaaattttaatttcagttgtagacctatcgtgctcttcatcctgggataatatcttcaattctgctggctgcagtttggtcccatcgcctagtgtcattcctgaagcaaaagttttaacagttgcatcattagctacaccagcaatttcagcacgataaactttatcaacatgcttaccaggtgcaagcaattcatgattcaactgaccatcattcgtcaaaaggagcaagccagtagtatccttgtccaaacggccaactggcacgattccttgataacggtcctgcggtgcaagcaaggaaatcaccgttggctgattgcgatcttccgtcgctgacaaaacacctttaggtttattcaataagaaataatgatatttttgataagcaacagcatctccgttaacggtaacctgatcgctttctttaacttgctgctttggcgttttaacaatcacatcattaaccgcaacaattccttttttaattaattggtgtacttcttttcgtgagccaacattcatattggccaaatatttatctatgcgcattatgtctttctttcgttcttatgtgttgattaatattaattatataagaaagttaacccaatttcgaattgcgacactaatcaaaaacggtcgattttgttttcgaccgtttttacgcgcgttttgcgcgcgattatttgcttaaaatatattttgtagctctgccttcacccattcttctaatataaccttgtttttctagttgccgcaaaatcttcaaaactttcgtcctaccaaacttactcatttggctaatttgcttcgtagtatccgcaccttcatgaattatttgatatactttcttttcatcattagacagatcgtccgtaataaattttaaaactggcaatattatctttatcgaattatcaaaaatttcaaactgcggttgaaccaaactacttctataagaatcatttattcttcttacacctgtaccaaattgctcaattaatcctaacctaaagaaaacattagcaataattggattacgcaaaatggaaatctgacctgaaagatattcttctttgctaagtccttgtggcaatccacctggagatactacttcaattctgtcatcatacatagaaattttaatttgcgaattaatgttccaaactcgatgaactaaggcattggctattgcctcacgaaaagcttcttctggaatctgacttacaatatttcgcgttgctccctgtatttcttcatgttgataatattgacgatatttttgaattgcttgcttatactctttaagaatagattcatgctcataacttgctcgatcaagcataatattaatgctttcaccaaaccgaacaatatcaattccacgataattatttttgtctgccaaaagctcaccggcattagtgtaactagtatccttacgctctaaattaagcgtaatcaatatatcagatgttaaacttttaattcctatcttttcttttaatgcttcttctaaaatgttaaatgacaaattttggttcatcgcggttaaactatcataggttctattttcaccaattaagattaactgtgataattcagatcggtccacttcgatcgaagcactgtcattactcttataggcctttgatttgtataaatatggaggattaactccttgctttactgttaaagtaaccacattagttttaggatcaatttctaaattataatctggatttggtttgatcgaatcgttgattttattttcaacatttaaacaaaattcaactggatttttcacaccaacgattgatccatcatcctttattccaaatttaattttgccactgccataatttgcaaatgcactaaccgtttttagaaaagtattcgtcaatttctctttaaattctaaatttttggtttctctcatttaggtcaccgtttctaaactatttagttataattatactctttcacgcgcaaaaaagcggtcgaaaacgaaatcgaccgtttttacgcgcgttttgcgcgtgcctattatattaactttaaatcaatacataatactactagaagtttccatattaacaccatatctttctaaataattaaactgtatcatattaaatttcaaaaacaccagtgaaattaatcctctataacaagtcagcgtcttcttgagctttatcatccaagaatttttcatttggataaattggcgtaatctcaataccagccattgccctttcaatcaggccttcaacgtcaagacgagcttcatattcacgcgctttttccaactttggcttagtcttaggacgcggtggagcaaaaattgtacaacaatcttcaaaaggttgaattgataaatcaaaggtaccaatctcttcagctttggcaataatctccgttttatccattgttgcaactgggcgaataaccggagtagtagttacatcattgatagccaccattgattgcaaagtttgagaagcaacttgaccaactgactcaccattaaagatagccaagccgccacgttgtgcacgaatgcggtcagcaagctgcaacataaaacgacgttgcacagtcatcaaatagccttctggcagtttttccttgatcgtttcttgaatttcagcaaacggtacggcaataaaattaatcttaccagcgtagtttgccaaaataccagtcaattccttagccttagccaatgccttttcagtagtgtaaggtggactaaagaagtgaaccatttcaatatctactccgcgcttcaatgccagccatgaagcaactggggaatcaatcccaccactaagcatcatcacagccttaccagcagtaccaacgggcatcccgccaacaccatggagcaactgattagaaatataaacggcatcttgacgaacttcgattctcaagaccaaatcaggatgcttcatttcagccttcaagccatccatatgatcaaacaagtagtcaccaactagattattcaattgattagtgtcgtattcaaacttgtggtcactacgcttggtattaaccttaaaagtcattcctggcttaaaagtctcttgcatcaattccaaagaagtcttttcaatatcttcaagagtcttaggaatcttaattgctggtgagtaagtttgaattccaaataccttcttcagacgttggtcaacatccttgaatgatgcgccattcaggacaatgtgcatccgatcatgacgaggatgaaattcaatttgtgggaaatccttaagaactttttcaacgttacttgctaagcgattgatgaagtcctttctgttcttccccttagttgaaagctcgccatagcgaaccataacttctgtgtattccattaattttctcccaaatgattaattttagcaaaatgattatagatcttgtcaaagaccttaataaattcatccgcttcttgaagcgtattcgtctcatcaaaacttaaacgaattgcactagtagcaatcttatcatcaattcgcatagaaaccaaggtgctagcctcatctgccgtctttgatgcacaagcagaagtagttgaagtataaatatcttgatcttctagcgtatgaaccaaagtttcgccccgaattccctctaaagcaaagcaaagaatatgtggtgcaaagccatcgcttactggtgaaaaaatattaatccctggtttatcttttagataatcaacaattttagccttaatttctgcttcacgcttggccttttctggttcatcttctaaaagcaaacgaattgccttagccattcccgcaattgcaggcaagttctcagtacctgaacgcaagcccttttcttgaccaccaccatcgtgtaatggggtcagcatcttgccttcttttttatataaaatacctataccacgtggtgcatggaacttatgcgcagataagctcgagaggtctactcttggtgtaaaaaccttatcccaaatatttttgccaagtgcctgaacgttatcaacatggaactgaatcgttggataattttcaagcaaatcgctaatctcatcaattggttgaatggtgccaatttcgttattaacgcccatgattgaaaccaaagttgtatcagaatcaatcgcgtttcttaagtcattaacgttaactcggccttccttatcaactggcaatctggtaacgcgccaatccaaattctctaacgcgttaaaactattggctacagatgcatgttccacgctagaagtgataatatgcttaccaaattcacgcttttgaattgcagtccccttaattgcggcattatttgattctgttccaccagaagtgaagaaaatttcatgctgcttagtccccagcaaatcagcaatttgtttacgtgacgcctcaagcaattggtgtgcacgatcacccatcttatgcaaactcgaaggattgccccaaatattagtcgctactttattgtaagtatccaatacttgtggatctatcttcgttgttgcactattatcaaaataaatcactatcattaccccttcatttaaaaaacggtcaatcgcttgaccgtttcaagacttttcaattttagcttaaataatgaatcgcttcaattaattactcttctcttctgaataatatgcattttcaagtcgttgataactacctggctctaccttttcaattgctgtagcaattgtatcaagggcttccttatagttatattcattatatagctgcattgctgtcttttgtgcttgcgcaattgaatccttatctgcatatttatttgaatactgcatcgtcaattcaactaggttagcggaattaatgatgtcatctgcttcacgtttaagccgctccacatcatcagaaatttgaattaattcagctgagatcttttccatattaatccggacctgacttaattcgttgctgacatgaccaatctcgttgactaccaaagtgtacatttggacaaagctatcaggattgccaggcaaatttcgtctttcaagtcgacgataaactaatgaaacttcttgcttaaagcgcttgattgaatcattagctacattttcagaatcataaagtccatcaacgtcagttgacatcttagcctgctctgcatcaatttcacgcaggcgatctagcatctggagccatgaatcttgaatagcagagtaaacacccttaccatctgcgatattctgtgtatcaatagtgtactgatggtacatttcattgacttctttttctaagtctttactcttttccaattcgccatgagtcaattcatagctctcatcaatatgccgcaacttttctaccagtttctttgacgcggtttgctgatgtgagatcaaagtcagcattttactttgatttttttcaacaaatggtcttgccttgtattccttagctaaaacatcatacaggtcgtcaatttcgccagagatctttttattttccttggctaattcatccaccttagtctcagctagcaatttgcgcgcaccatcaatttcatcatgaatttccttgattctgcccaaaacatctacgctagtaaggtaatatttttctgaaatcatttttttataagcatcagacaattccttaagctgatcttggaacactacttcaagctgatgataaccctcttttagcggttttaagcgtttttgtaagttacccaaagacatccgaatcttggacaaaactcgcttagcttcaacatgatcaccttgtgaagaaagattttttgcttcttcaaagtcactctccattgatgctagttgatcttcaacctgatcaatcgcagcaccatattcaaaggaattggctaagatatcttttcttaattcacgataaactttaatcaaagcatcatattgaatttgattttccttatttgattcaagtagttccgtgaaaactgccttggtgttacgagcatcttcgagcgttggcttgataatctcctgtgcttgtttaatattctttcttgctttaaacaagcgataagttgcattttcattagcagcttcttcaactagcttatgcactcgcggtaattttttcttagctgcttcagtgtagctcttgcgccaagtatttaatgtagttaaactttcgccggccaaatccattttatccagtcgcgtaatatcatcttctagatgcatcttctcaatttcagtcactgctgcatcaatcgcttcaatttcttttagttgtttacgattgatcattagcattgctgcaactacgacaatgattaggatcaccacggcaataattataatagcttgaattgatgacatagtttatcctccaaaactatcataattataacaaaacctgaccctaataggtgcaaaaagctgttctattttcttgatttattattctgaactctatataatactattcgtgtaaaatatttgcagcaataagtgacaagaacgtcaacatcttgaaacgctttagtgaacgagtaacccgcgctgcattgggcgaaaatgtaaatccaagatgcacgaatgttgaacttatgcttaatattttactccaaaaattattgtttaaattttatggaggattttttatgtcaagatatacaggtccaagttggaaacgttcaagaagattgggtatttccctttcaggtactggtaaggaaatttctcgtcgtaactacgctccaggtcaacacggtcctaacaaccgcggtcgtttgtcagaatacggtcaacaattgcacgaaaagcaaaagttacgttggatgtacggcttaaacgaacgtcaatttagaactttgttcacccgcgctggtaagattcgtgaaggtcaacacggcgttaacttcatgattttacttgaacgtcgtttggacagtcttgtttaccgtcttggtttagctactactagagaacaagctagacaattggtaaaccacggtcacattactgttgatggcaagcgtgttgacattccttcatacgaagtcaaggttggccaaactattggcttgaaggaaaagtcaaagaacttacaacaagttaaggatgccttagaagcagttactgctcgtccatcatttgtttcatttgatgaaaacaaaatggaaggtactcttgtacgtttaccagaacgtgacgaaatggaaccagaaattgatgaagccttagttgttgaatggtacaacaagttactttaatttttacattttattttgtcgaaagtctttctcaatcgagaaaggcttttttctttgctacaataagtacataaaaagaaaggatgattagatgactgaagatttaaataaacgtgttgaacaagcagctcaaggtattactccacaaactaagcctgatgaacgccgcagatttttaggttcattacgtgagcgctgcttaatccgtatggacaatactgaagttaaaaatcctgaattaactgccctatttcttaaacatatcactgactttaagggctatactattttgatcaatggcaatatcactgatgatggcttcttgggagacattgaagccagttgcagcaaatatgatattcccttcactttagttaacaatgaaaccgcaaaaacaggaccacatgatacggcagtactagttgtagcgaaaaacgctatcaatcgaccacgaattgagctaaagcaagtttatccacctgagtttcctaaagaagaattagccgcacctaaaacaaaagaaagtttttggcataaactttttcacggagataagtaaatgaaaccattagcatatcgtatgcgaccaactaatttagacgaagttgttggtcaaaggcatctgattggtccaggcaaaattattcgccgaatggtggaagctagacttctgtcttcaatgatcctttacggccctcctggcatcggtaagacaagtattgctagtgctattgcaggctcaactaaatatgcctttagaaagctcaatgcagctactgacggcaaaaagcaattgcaacaagtagccgaagaaggcaaaatgagtgggacagttgtcttattgctggacgaaattcatcgtttggacaaaactaagcaggacttcttactgcctttgctagaatcgggacaaatcattttaattggggcaactactgagaacccttatatttcgatctcccctgctattcgttcacgttgccaaatttttgaattaaagcctctttctacagatgatgcttctcatgcaatcaatcgcgcattgaacgataaagaaaaaggtctaggcaaatataatgttgaattaacagatgatgcgcgtgctcttttgattgaaaaaggcaacggtgatttgcggtctactttgaatagtttagaattagctgttctttcaactaagcaagaattgcaagataaacaccaagatgatcaaaaaattatcatcactcaaaaagaaatggctgattcaattcaaatgaaggtgcaaaactttgatgcttctggtgatggacattacgatctagtctcagcatttcaaaaatcaattcgtggctctgatacagatgcagcgctgcactatcttgcccgattaattgaatctggtgacttagtctctatctgtcgaagactagcagtaattgcctacgaagatattggactagccgatccagacgcagctgaacacgctatagtagccatccaagctgcacaaatggttggcttgcctgaagcacgaattccactggctaatgcggttattgagttagctctttctgccaaaagcaatagtgccatttcagcaattgatgctgcactagctgatattcgaaccaaaaaagttgactcaattcccgccaacctaaaagatgctcattactctggtgccaaaaagcttggacatggcgtgaactacctttatcctcatgattatcaaaatgattgggtagcacaacaatacttgcctaataacctgcttcatgccagctactttgcacctaaaggcaattctaaaatcgaagctagatataaggcaacctatcaaaaattaaaacaaatgcagtctgataacttgcgcaataatcactaatctcgcgcattcaatatggttgacaagcacctgtaatatgcgtattataataagtgatctgagttgatcgacaagcttaaatgtataaagttgaccgatcaaactataagacgtgggagttggcaaataactaccgaatcggaatactgccttgttgcaggatccatattcgctgcgatgccagctaaaattttgaacattgcgggttcaacaagcgtcattatgctatgtttagtcaactcggatttctttagaatattaaaaaaggcggtctcaattgaccgtctttttctatagtggagactgttaaatggcaataaagattgtaatgattatttttatccttctcctactgttaacctcgtggtacatgtggcacagaaggaacggacattttttaatttatgacattggtggcgatccacgcttgagcaatattcttaagtggacttcagtcgcccttttagctgaaagtattttagggattattttgctattcatgggtaataaatatttaaatctaatcaccttattcttagcttcattaactattttggcttttggtttatcaattactcaaaataaagaataataattcactaatgacaagcaaaattttggtaaaatagaatatagaaagaggtgcttatatatgctttcacaatacaagaatattcaagttgcagttgatggttcaaaagaagctgacttggccttcagcaaggctgtagccatcgccaagcgtaaccatgcaacactagaaatcttacacgtaattgatactcgttctttccaaaatgtttcaagttttgattcagcaatggtagaacaagtttctaaagatgctgaaaagagaatgaaggattaccaagctcgtgccactaaggctggcgctgaagatgttcactactctattgaatttggttcacctaagacaatcattggacatgacttccctaagaagcacaatattgatttaatcgttgtgggtgctactggtttgaacgctgttgaacgtctgctcatcggtagtgttaccgaatacgtaaccagaacttctaaatgtgacgtcttggtatgtcgtactgaagaagttaaggatgctttgcaaggctaattatttagctttaataaccgataaaaaaatacctccaaaattcagatttgaatttttggaggatttttttaatgttatttctaaaaatcgccagccgtactgaacatgtaatcacgattatggaacttcatcgacaagattaatccaatcccaatcatgtttcccatcagagctgaaccaccctgagaaacaaatggcaatggaatacctgtcaatggcaataaatcaatattcatcccaatattttcaaatacgtggaacaagatcatcatgataacaccagttgcaatgtatgaataaaagacatttctggtatcgaacgagatttttaccatttgaataatcaggtataaataaatcaaaatcaatgctacacagccgacaaaaccaaagttttcaccaattaccgagaaaaccatgtctgatccacgaactggaacataaacgctagctttgccaaaaccattaccaaatagttgaccagaaccaatggctttcatactttgccataactgataagctcctgatgaagtatcaccagatggatcgagccaagacttaattcgttcaaattgatatgcttgaaagaaatgactcaacaatgattgcccagccgacgtagttactaatacaataaccccaatagctgctaaaatcaaaataccatataacggtacaataattttccaagaaatccctgatactaaaaccacgccaccaacgatggcaataaatactaacatagtaccaaagtcattctgtaactttagtaaaattgctaccggtgccagccaagcaataattttgcctaataacaaccaatcggtcttaatcgtgtgaccatatttatcattatgctctttgaccactcgagccaacatcaagataaaagctggcttcataatttctgaaggctgaaaagtaatcggccctagtttgaaccaacttttcgcacctgtatctgcagctacgcttctgttatataagaatagcaccgcaatcagcaaaaatattccgattccaaagaaaattggcgcaatcttaaacaactgttctgcatcaaactgcatcacaaccataataattgcaattgaaatcaagtaccataatgcctgcataactactgccctaacaggtgaaccaatatgactaggatcacctaatgcagcaacatagatacaatacaagctaattaaagccaagagtagcactggtataataatattccaggctaatcgatcgaatagacttgtttcattttcaacttttgccattaaataatcactacttatattttatttttcatgtaaggtaaagtatgaaagtaagtcattaatgctgctttcaagactgttagcaaacaaaatattgcttgtcttagaagtagtagcacgataacgcccctctaccttttcaattaaaccaatggactttctattaggaataacaacttcccacgttggcaaattctttcccttaagttcattaacttcaatatcaatattctctaattttttagacataaatcctcctacttgctatccggatgaaattttgaagcaataattggatcttcatatctctccggatgtggatttcgaaaaatagtaaaattatcaggaactggatccactccacccttgataaatgggttacaccttagtatacgacaaattcccataatcagccccaaaataggaccatgttttttcaatgcatcaatcatgtaattggagcatgttggataataccgacaacttggtggtagtaaaggtgaaatcactgtctgataaatacgtacaataaaaatcaaaatcttacgcaagtaatctcctcacttagtgtcgttgatgcttttcaatatttttaagcaaagtacctgttcctaaagcaactgcttctaatggatgatcagcaattaaaactggaacttgcaaataataagaaatcaacttatcaatattctttaatagggctccaccacctgttagcatgattccgcgatcaataatatctgctgaaagctctggtggagttgtttccaatacttctttagctgctgcaatgattgacatcaagcctggttctaaagccttttgaatctctggtgcagtaactgtagtctgcttaggcaaaccatcaactacgtcacgaccacgaacagtaatttgttcatcttggtctggttcaaaggcgctaccaatttcaatcttaatttgttcagcagttctagaaccgattaacaaattatgcttactcttaatgtaactgatgacagcctggttcatccgatcgccagcataacgtaatgattgagaagttacaatttcacccattgataaaactgcaacgtcagtggtacccccaccgatatcaatcaccatattaccttgcggtttaaaaatatccaagcctgcaccaacagccgcaactttaggttcaaagtctaaataaaccttgccgccaccagacttttcagctgcctgaataattgctttttgttcaattgaagtaactccagtaggagcacaaatcaaaatatttggcttggacataaagccttttacatttaatttttcaataaagtaagacagcattgcttcggtaatgtcaaaatcagcaattaccccattcttcaaggggcgaattactcgaatattacctggagttcttcctaccatctcatatgcctctgaaccaactgcaactaccttgtttgtatcggtatttacagctacaacagaaggttcatttaatacgatacctttaccagagacattgatcagtacgtttgctgtccccaaatcaattcctatatctcgtgccacgataaccctccataattattcaccgtccattttaccataaataatcatgactttcctttactgtccttgttttaacacaatctttaaaacaaattactcaattgcattgaagtatcgataaaagtaatgacaaaattgccaactaaaaagcctaagccaattgcaataaataaatataataattgcgtttcaaaaacatggcctttacgaataattttatctagttgaattgctttaactgcttgaaaagataagccaatcgcaatcaaatatataatgatactaataatgacatgaacgcctaattgaaacatatattttcctcaattttgacaaaaaaagacggatgcagcattttgtgcattcgtctcttccttcttctagtgacctttagtgttgtacacgctaattctgttcattgctcgtcttaaagcaacttcagcacgtgccatagtttgttcgtcatgtttttcccgtgcttccttcaaacgttgctcagcgcgttgcttcgctgcctcagcacgagaaacatcaatgtttcttgcgcgttcagcactatctgcaataatcgtagcaacattattcgaaaactcaatatagccacccgaaatcgcaatatgatcaactactgaatccatttcacggcttcgcttaatcttaacctcactaataactagtggagttaaaagtggtacgtggttatacatgattgaacgttcaccatcaacggcacgtacatcaacgatacttccacgatgtgaataaatcattccattaggagttacaacatctactttaaaaagcttctctggatctgccatttgacatcaccctacttttctagtaaagctttagcttctggatcacttggagttacacccatttcttgtgcttttttcaaaacatcttcaattgggccgacaccacgaaaggcatcttctggtaagtcatcaagatgaccatccaaaataagcttaaagcccttaatgctttccttaattggaacatatgaacctggtacaccagtaaattgttctgcaacaaagaagttttgtgacaagaagaattggaccttacgtgcacgtgcaacgatcaatttttcttcatcagacaattcatccatacctaaaacagaaataatatcctgtaattcatggtaacgttgtaaaacatgttgtactcgagtagctacttcatagtgttcttcaccaacaacttcagggtcaagggcacttgatgaagattcaagtgggtcaacagctggataaataccttgttctactaagctacgttccaagttagtagtagcatccaagtgtgcgaatgtggttgatggagctgggtcagtatagtcatcggcaggaacataaacggcttgaattgaagtaattgaacccttcttagtagaagtaattctttcctgcaattgtcccatttctgttgctaaagttggctgataaccaacggcacttggcatacgaccaagcaaagctgaaacttctgaaccagcctgagtaaaccggaagatattgtcgataaagagcaacacgtcttgaccctcaacatctctaaagtattcagcaagtgtcaaaccagttaacgcaacacgcattctggcaccaggcggctcgttcatctgaccaaataccatggccgttttacttaaaacgcctgaagctttcatttcgaagtaaaggtcgttaccttcacgagttctttcaccaacaccagtaaatacggaaataccaccatgttcttgagcaatgttgtgaattaattcctgaatgatagtagtcttaccaacaccggcaccaccgaacaaaccaactttaccaccacgtacatatggctcaagcaagtcgataaccttgataccagtttcaagaatttcacgactagtagtcaagtctgcgtacttaggtgcttccttgtggataccttcacgagggtgatcttttgaaaattctggaccaccgtcaattggttgacccaaaacgttaaacacgcgtcctaaagtatcttcaccaactggaacggaaattggaccgccagtatcttcgactttcataccacgacgaagaccatcggtagattccatggcgatcgttcttaagacaccatcaccaagctcaagtgtaacttcaaggacaatgctttcatcctctgacttaattacacgcaaggcattgttaatatcaggtaaattcttatcaattgggaatttaacatcgacaactgggccgattacttgaacgatttcaccttcactcaaaacatctacctccttttctttattactctaaggcatttgcaccactgataatttcagtaatttcagtagtaatttgtgcctgtctagcacgatttaattttgtagttaagtttgataccagatcattagcattatcagtcgcactctgcatggctgtcattgaactagcatgttcggcagtcttagcatccaaaatagcaccgtaaatagtagaacgtgcatattgtggtaacaacttcattaacacttgatttggatctggttcaatatcgtattctaattctttatgtgcttcagcttctttgacaccaatatctaaatcgacgattggtaacattttttcaacacgaaaagcagatgataatgagttaacgtggtgagtataacatacgtaaagctggtcatagacaccattcaaaaacatcttaattgcggttgaaacaattggtaatgcttcatcaaaagttggtacatctgaaacaccattcttttcataaacaacgttaatattgttctttttaaagaattgtgccgcaaccgaacctacagcaagaactttgatatcgtgtccttgagcacgttcgtcctcaaagatactcatcatattcttaatgacattgctgttataagaacctacaagaccacggtcacctgaaattaccaagaaacctgttgtcttgatattcttacgtggctgaatcatatctgctgtaatccccaaaccaaagacatcagtataatcaatttgagcaacattgttcttatcaattgagacgtctttttcacgtagattatcaactacttctgagctaattaaacgagaaatagttctacgaatatggtcgttataaacggtataacctttatcacgattttcagtttggttcaactttgaagcagagaccattctcatagcttctgtaatcttaccagtttgttttactgaagcaatttttttctttaactcaagtaaagatgcaggcatattctacctcctatttctcacttggtgtaaagctctcactgaattcttcaattgctgctgacaatttcttatcatctggcaattgaccagtttcacgaattgtcttgagcaaatcagcatgactgctgtcaaagttatcaaataattcgttttggaaacgagcaatatcttcaactggaacagcgtcaagatatccgtgagtcaaagcataaagaatcacaacttgcttttcaacaggaattggatcatgaagtggttgtttcaatacttcaacggttctttgacctctattcaacttagcttgagtagcttgatcaagatcactaccaaattgagcgaaactttcaagttcacggtaagctgcaaggtcagtacgcaaagtaccagcaaccttcttcattgccttgatctgggcgttaccaccaacacgagaaactgagttaccagcatcaatggctggacgagtaccagcaaagaacaaatcgctttgcaagaaaatctgtccatcagtaattgaaattacgttggttggaatatatgcagaaatatccccagcttcagtttgaataattggcaaagctgttaatgaaccgccgccaagtttgtcattcaacttagcactacgttcaagcaaacgtgagtgtaagtagaagacatcacctggataagcttcacgaccaggcggacgacggagaagcaaggaaagttcacggtaagcgacggcttgtttggataggtcgtcaaatacgattaatacatccctgccattgtacataaattcctcacccatagcagtaccagcatatggtgcaatataaagcattggtgctggctcacttgggcccgcttcaacaacaatggtataatccattgcgccaaaacgctttaaagtttctacttgagttctaacggttgattccttttgaccaacagcaacgtaaatacaaattacgtcttgccccttttggttaaggatagtgtcgatggccaaactagttttaccagtcttacggtcaccgataatcaattcacgctgaccacgaccgattggaactaaggcatcgatagccttaataccagtttgaagtggttgatcaactgattgtcgatccataacccccggagccttggcttcaattggacgactcttgtcagtcttaatttcacccaaaccgtccactggttgacccaatgggttaactactctaccgattaaggcgtcaccaacaggaacttccatgattcgtccagttctttgaacacggtcaccttcacgaatattgtcaaattgacccaaaataatgatacctacatcatttgattcaaggttttgtgcaataccgtatgagccgttatcaaacttcaataactcaccagacaaaacatcgttaagtccgtgagcacgggcgataccatcaccaacataagttacaacaccaacttcgctgatgtcaagcttatcgtcgtaatgttcaagttgttgcttgatcaaggaactaatttcttccgctttaatgctcaatggtttcacctcttttaatttttatcaattatctgcgcacggatcttcttcagtttattcttaactgatccatcaatcacgcgatcttctacttgaagaaccacgccgcctaaaatacttggatcaactttattctctagacgcaccacgtttaggttatatttcttagcaaaactttcacctaaacgtttgagttgatcatcatctagcttaacagccgtagttgcaacgccagatgcgaccttcttttcattatcataaagtaagacaaagcgatcaataatatcgatcaaatcagcaaaacgatcatatttaagtaacaaattcaaaaagttttgaacctcatctaaaaaatctttttcaattgcagtcaaaagatcctttttatctttattacttaaaataggatcgctcaagacactaatgatttgtggattggcttcagcagccttttttaattccaccatttcattataaacagtgtctaatgcatcattgtcttgcgcataaccaaatagtgcggcaccgtagcgtgctgcaatttcttctctacttaaagccattaatcatccaaccccttaataaattggtcgactaaatctttttggtctttagcagataaattcttagcaattactttttcagcgattgctacagaaatatcagcaacttgatcgcgtgcagaattcaaagcgtctgcttttgcctgatcggcatcttcattagcctttttgcgaattgctgcagcatcttcgtttgcatttgctacgatttctttacttgtgttttgcgcgttactcttagcgtcagagagaatttgtgttgcttcttgtcttgagttcttcaaggcagcttcacgctcattagcaagcgtttcagctttctttcgttcactagcagctgaatccaagtcatcaataactttttgccgccgcttttccatcatatctgatactggtccccaagcaaagtgcttaataagaagcatcaagatggcaaaacagatcaaataccagatagcattacctaagtaaatatgtgaggctgcaaataatgtttgaatagtcatttactgcccttctctctttaatactattcctttaaacagaaaattatctctttttattaaaggaacaaaatcaagaaggcaacaacgatagccaaaataggaacggcttcgatcaaaccaacaccaataaacattgttgctctcaagttacctgcactttcaggttgacgagccataccttcaagagtctttgaaataactttaccgttacccaatgatgcagccaaagctgctaaaccagctgcaatggatgcagcaagatatttaaaagcttctgacataaatttatacctccaaaaatttattctgtagtaaccttcttaccaatgtaaaccattgataaagttacaaaaacatatgcctggatagagccaatgaagacagagaaaccttgccaaatcatggctaatggagctgccaaaactaacgtaaatggtccaccagcatgtgctagatcattaccaattaaagttagcaaaacttcaccagcataaatattcccatatagacgtaatgataaggttaaaaagttggtaaactcttcaattaaattaattggaagcataaaaccaactggttgcgtatagctcttcaaatatccgccaacaccaaatcgttgtacgccgaatgtgaacgatagaagcaaggtcatcattgcaaacgacattgtcgctactggatcagcagttggtgatttaataaacatccaatcatcaactttgacttccatgaacatccctaattggttcataaaccaaataaacaggaataaaacaaatgcatatagtgataggtgattttgagcatccttgtcgctaacattatctttaacaatgccgttagtgaaatcaagtaaatactcgaacacattttgtctcttattgggtttcatttcaacttttcttgaaagccaaatgcagataaataaaactgctaaagccattagcgttgaaccgataataccagaaagttcaaaattcaagcccatgaatttaaaaacaaatgatttctccattacttcgtgacctcccttctcgtgctgaataaaactcgaacacgtaaatcatcttaacaccaaaaaaggtctttgtgtaaaatgaaagcgcattagagaaaatatttttctaaaaaggacgattacttagtaccaaatagtctgtcaccagcatcacccaaacctgggaaaatataaccattatccatcaatttgtcatcttcagcagctgcataaatgtcaacgtcaggatttgcttcttgaactgccttaataccttctggagcagctaccaaaacagcaagcttaatttccttaacaccacgcttcttcaatgcagcaatggcatcattagctgagccaccagttgcaagcattggatcaacgactaaacattcacgttcagcaatatcctttggagccttgaagaaatattcatgtggcttcaaagtcttttcgtcacggtacatcccgataacggcaatcttagctgaaggaaccatttcaaggacaccattaagcatccccataccggcacgtaaaattggcacaattgtcaacttcttaccagcaatttccttttggacagtcttacccattggtgtttcaatttcaacatcttcaagtggcaaatctctagtgatttcataggtcattaacccaccaatttcaccaacaatgcgacggaattcatttgaccccgtatccttgcgacgaataatagtcaacttgtgttgaatcaatgggtgatccaaaactacgaactttcccatatatgcctcctataaaaaataatatgatcattaaatattttaatcaaaaacgcaaagggtttaaagccctttgcgttttattttttatttattgaaatgatgtccacctgcagctttattcaatcgattcatgtaagctaaactttcttcaccttcatgaaatccttgtacataaatagtttcgatatcatcttgatcatcgaaatagcgcaagccaccaaataagttatggtcggcatcaactaaattgttgcccagatcaaatttatttgcttgaggtaaattaattttagctaagactggcgctaaagctgctacaccaattttttcattaaaatcaatttttgcaaaatcagcaggatcatcaaccacgactaccggctcacttggagcataatgacggtatttcattcctggtgccttaggtatatctttgtctgacactttgcccgtgttaattaaaactttttcacctaaaacttcgcttaactcttctggagtaatttcaccaggacgaagaacgattggtgtttctaccgataagtcgataattgtcgattctaatcccacacgagtagggccatcatcaataattccggcaatcttcccttttaaatcatggtaaacgtgctctgcagtagtaggactaggcttagttgaggtattagccgatggtcctacaattggataacccaatttagcaattaaatcatgagtcaattgatcatcaggacaacgaaatgctacagtatcaagtcccccagtaactgcatctggcagagttcctggtttaacaaacaatagcaatgtcaaaggacctggccagaaatgtttaattaatttcttagctctttctggaacttctttagcatacttagccatcatttcttcgtcagaaacagtaacgatcaatgggttatcacttggacgtcccttagcagcataaacgcccttcacagacttttctttggttgcaattgcacctagaccatagactgtctcagttggaaaagcaaccaattcacccttagctaacaacttaactgcatcattgatttgatcttttttaaaaatcttcgtttccatcattcttatttttgccaccttccatgaaccatgcgtggcttgccggccatatcttttctaaattcgatttcaaaatcaggcaattctttagcaaacaattccttcagttgttcttcttcgctaaaaccaaattctaagaaaaattctccatggctattcaaatgctcacgcacttgcttagcaaattttttatagaagtctagaccatctttgccagcaaaaagagcttctttaggttcattttgcaagacattttcatccattacattcttttcgcttgtcttaatatacggcggattagagatgatcttatcaaattcttctaagcccaacagcacgttggctttacgagtagttacatcaagatcataagttaaaaagttttcctcacttgttcttaaggcagtatccgttacatcactagcatataaagttaaatctgtaatgccttttttctgtgcttctttagctaaagccacggtaatacagccagaaccggtacccaagtcaaggacttgatcacctgatttaagtgtctgcaatgcccattcaaccaattcttcagtttcaaaacgaggaatcaagacaccgcgttgcaccataattttatagcccaaaaaccaagcataacccaaaatatactgtggagatatgcccttagccaatttttcgatatctttattggcctgcttaatctggtcagcagttaagtccatttcttgcttcagttcaaattcacttggtgtcaagcctaagcgctctgctagaacataatcaacatcctcaggacgcgcattttcagcactctcacccgctttaatacgcatctgctttaaagtcattttaggcattttgatcagccaactcctctaattgcttagtttggttgtaaagaattaatgcatcaataatttcatcaagttcaccgttcatcacacgatcaagcttgttaatggttaagccgatgcggtgatctgttacacgattttgtggatagttatatgttctaattctttcggaacgatcaccagtaccaactgcattctttctcttagcatcgtactgagcttgattttgactttcataatagtcataaacacgtgatttcaaaatttgcattgccttttcacggttctgttgttgactacgttgatcctgcattgcaactacaatcccggttggcaagtgagtcattctaacggcactagaggtcttgttaatgtgctgaccaccggcaccacttgaacggtaaacatcaacacgaatatccttaggatcaatatcaatgtctacttgctcatattcaggcataacagcaacagtggcagttgaagtatgaacacgtccttgagattcagttactggaatccgttgaacacggtgtgcaccattttcatactttaatttcgaataaaccttgtcaccagtaatcatgattgccacacgtttatagccgccaacctcagtaggttctgaatcaatcattgaaaccttccagttttgacgttcagcatatttttcatacattctaagcaaatcgccagcaaacaaagaagcttcgtcaccaccggcagcaccacggatttccatgataatatctttatcatcgttaggatccttaggcaacatcaaaatcttgatttgatcttcaagctcgggaatttctttctcaatttcagaattttcttccttagccatttcaattaaatcaggatcagtttcactggagataatttctttattatcttcaatctcttttttgtcctctttgtacttcttatatttttgtattacttcacgcaaatcggcttcttccttagaaatctccatgtagcgcttagtatcattaataacttcaggatcggccatcatttcctgaagttcttcatagtgagctactagaccctctaattgagccataactttatccataaactaaaaatcctctctatctttcaacacctgggtgaaagtaatgatagcgacaaacaggataataactttcatcgccaccaatttgtacttgttcaccctcataaacaggcttgccattgttaattcttaaattcattgttgccttgtgtccacaataatgacaaatggtcttcatctcttctattttatcagcaaaaatcaataaattttcactaccttcaaatagatgattttgaaaatcgttttttaagccaaaggtcattactggaatattgaacacatccacaattttagcgcattctaagacatgatgtctcttcaaaaattgtgcctcatcaattaacacacaagctagtttaccatcaccatcagcaacatctgctttgttcatctttttaatataatcaaatagattcatatcagcagtaattggaattgcttctcggtgaagtccaattctagaagcaatcgttcctacaccgctacgattatccaagccactggtcattagggcaatcttgcgcccctgtgcttcataattgtgagctactttcaagatctcaattgttttgccactgctcattgcaccataacgaaaaaataattgcgccatgctggccctcccttttaacaaaaagtcttcgccttaatagtatagaggaaaaaataaatttgtgtaggtattaaacctcgttttcatcctcgctctatgctaaacttagacatagttttaaagtgagggatgtacatgagttttaaatcaggaattgctaaagttgccggtaaatcaagctattggtttttgcataatgcccttaagggcggcaccagttttccaggcaaattagcaatgaaaattgatccagaagttttaaattctttagccaaaggctatgaaactgttattgtcacgggaactaatggtaagacaatgactactgctttgattgttgaagctttaaagaaaaagtatggtgatgtgttaactaatccatctggttccaacatgcaacaaggaatcgtgaccgcttttttggctcacaagcacaagagagttaaaagaaaaatcgctgttctagaagttgatgaagcaaatgttaaaatggtgaccaaattacttcatcctagcgtctttgtattaaccaacattttccgtgatcagatggaccgttatggtgaaatctataccacttatgacaagatcgttaatggtattaaattagcacctgacgctacaattatcgctaacggagatgcaagcattttttcatcagttgaattgcctaataagaaaattttttatggctttaaacttcctgatgacaaacctgaaaacgacttcaaggctccagtcaataccgatggtgttctttgtccaaaatgcgaccacattttacattatcatgaacgtatttatgccaacttaggtgacttcttctgtcctaactgtggctaccaccgtcctgatttaacttttacagttaacaagattattgatcaaacacctaatagctcaacgttccaaatgggcaacaagcaatattccattaatattggtggtacttataacatttataatgccttagccgcctattctgttgcacgccacttgggattaactgaagctgaagttgctcaagcttttgcagaaaataaacggatctttggtcgtcaagaattaattcactatggcgataaggatatcgatttaattctagttaaaaacccagttggtttggatgaagtcttgcacatgcttaatacagaaaaagatgattattcactagttgccttgcttaatgccaaccacgctgatggaattgatacttcttggatttgggatgctgattttgaaggattagacaaagaaaagattaaaaagatcctcgtcggtggtcaacgctggcatgatatgggctttagacttgaaattgctggctttgatccaggacaaatgagtactaatccagatgatgatagcctaattgaagaaattaaaaaactgccaactaagaaggtctatattctttcaacttatactgcaatgcttgcacttagaaagaagatggccgaaaagaaaatcattaaggctggtatgtaaatagaaaggattcccgcgggaatccttttttgtgtacaaaaaaggctgtagctctaatgctacagcctttctaattattgggatattggggctcgaacccaaacatccaggaaccagaatcctgtgccttaccaatttggctatatcccagtaaatcacccgtacgagaattgaactcataactccaccttgagagggtagcgtcttaaccatttgaccaacgggcgaatcaacatttataattatgcttttttcttctatgcttgtcaagtaattttaactataataatgctaatggatggtgaaacatgatcgactttaataaaacacagcatttaattgaatcaatggtttttgaacgcgttgttccaggcgtcaattacacttttatcaaaaataagcaaatttttacatcaactactggttttgctagtatctacccagaagttactcagctgagcccttttgcagaatacgacctagctagtttgactaaggttttagcaacagaaaatgtcttgcttaagctttatgaccaaggcaaacttaactttaccgagcccttgcagcaattcgttcctgaatttaaagacccgcgtgtacgcctttatcacttgctaacccatactagtggcattcgtggctggatcccccaccgcgacaaactagatcatgatgccttactacaagcaattatcaatctgccagtaactgacgaatttgaacacaagatgcggtatgccgatacaaactttatcttacttggattagttattaaaaagatttttggtaaacctgtccaagaagtagtcacagagcaagtcctcaatcaaatgccgcttgaaaatactactttttcaccacaaaaagatgattgcgtgcctactgccctagttgatggccatgtcttgcaaggtattccacatgatcctaaagctagacaacttggaatagattgcggttctgctggcttattttccaatcttcaagacttagttaccttcgcccaaggttatttaggactaaaggatattttaccttatagtcaaaagactgtcagccagctatttgataataaaaatccccaaggcataaaaccacgctcttggggatgggaccttcggtttgatccaaagcaaaattatccgatcattttgcacacgggttttactggtactttaattattcttgatcgcatcaaacgctctggtctaattttattgaccaatcgagttcatccgactggacacaacactgttttcttagctatgcgcgaaaaaattatccgtagttttatcaacgaaaacgccaaaatataatttatagaaaaaagacggctgtgtgtcagtcgtctttttatctctcactaaatttcatcatccgtctagtattataacttaaacttcccacacgcaaaattgcttgtttcattgtgattctgcgtgttttgacaaatataaaaggcacaagtccttttcattgctataattatattgaccaaaacataatttatttgcatgaaaggcttgtgccaatgtctattttaccatctcctgaccaacaaaatgaacaactattttcaaactcaatcatcagcttcatcaagaagtttcaggtgatcaagctgttgagaaaatgtggcttccgcaaggaaaaaggcattagcctgttcagcttgtttctttacgttttaagcaatgtctttcgtgaccgcagcttatatatgcagctgaaaatggatcattttcaagaaaatttttccaagaactcatattaccgttttatgcgcaacgttcacgtcaattggctccacttcaccacacttctgtctgcgcaaatcattaataaccacttgcgatctttgacttcagaaaaacgggctgattgctttgttgtcgatgattcctacttctctaggaccggcttcaagaaaacagaattagtcgccaaagtttttgaccatgtatcaatgacttacaagaaaggttttcgcatgatgaccctgggctggactgatggagcttctttcatgccaatcaattcagtgctgctgtcttctcagaagctacagaatatgattggcgaaaataaagtttttgatcagcgcaccattgctggccaaagacgtatgcttgcccggactaaaggcacagacgtgatggttaatttaatcgaccaagctatgaaagcaggtcatcaagccaagtacgtgctgtttgacagctggttctcaaatccacatcaaatcgtccagctcaagcaaaggaagctggatgtgattgccatggttaaggttagctccaaaatcaaatatgaatttgagggagaacgcaaaaacatcaaacagatttatcgcagctgtaaaaagcgatgcggccgttctcgctacctgctgtcaatcccagtcaaagtcggacgccaggacaaagacggtgctaaaatagatgcacggattgtctgcgttagaaaccgtgccaatcgcaaggattggctggcaatcatttgtaccgacatgtcgcttagcgaagatgaaattatccgcaactacggcaagcgttgggatattgaggtttttttcaaaacttgcaaaagttatctaaaactaagtacggaatatcatggcctgtcttacgatgctttgaccgctcatgttgccatagtttttactcgctacatgcttatgtcagttgccaagcgggacgatgaagatgaacgcacgctaggcgagctgttctattgcatgattgatgagctggcggacattacttttagccattccttgcaattgattactgatgcaatgctggccagcgtaaagcaagtctttcatgccagtgaagcacaaatagctgaattcacggctgactttatcaatcgtttacccaaatacatgcaaaaattgttaaagaaaactagcaaaaataatatagaagcctaaagccaagcaagatcaagagattactggcttatttagtgtgggaagtttaagttataacttattttaacgctaatgtactagtcaaatattatttttctgctttaaacattttccagtagctaattaaaatgattaatgccattaataaagtaaaataaaaggccgcctgactaccttgagctgtcgctagtgcgtaggacgttgcaccttttttctgccagatcgacataattgctgctaagatagttgttcctacagaaccggctaattgctggctagtctgacaaactgcggttgcatcggcgcgcaatgctcctttttccacctttaaagcttcagctagcgtgttagaaaatgacattctgtgtcctaacatcatgatgccataaataataatgatcatcatcacagtcaaatttaagccccaaatagcaaataacaagcagctgatcgccattaagaagccacctaaataaagtggcaatttagctccttttttatcatataggctaccaaaatatggattgagtagccctgcaataatactacctgatagtaaaatcaaaccaccaactaaagatgtttgctttccgacaatttggatgtagttaggcaatacaaaactgataccaatattattaaattgcaataaaaagtaagctaacgcaccataaacaaacgctttttgcttaaatacggctagatctaacaatttcttggatgattttttagataatctaacaaataaccaaattaaaattgcagtcacaattaataaaatccacattaaaggattagcaaatccattactaatttgatttacgcctaatgtcaaagtaataaatgctatagctaaaacgataaatgatagccaatcaaaactatttttagtttgttcatgatacttaccgactacaaatagcccggcaacaaaaacaatgatcgcaaaaattgtaacaaaaccaaaaatccagcgccagttaagataaaaagtagtgataccgccaaatgctggtcccaaagtcggtgccatagctactactaagccggcgattcccatgtaaacgccccatttttcgcgaggcataacttcggttactaagttaaacatcaacggtgtacttaatcctgcacctagagctgaaatcagccgacctaacaataaaataggaaaattaggtgctacagcactaattacgcttccaatcataaaaccaacgcaagcaacaataaacaattgccgcgcagtaaaacgttcattcaaatatgaagaacaaatcataataatcgcaatcgccaataaatatcctgttgtcgtccattgaattatatccaaaccgacaccaaattgcttcatcatcgtaggaaaagtgacgtttaaactagtttccgtcaaaattccgacaaatgacataaacgcagctgataatactgctaaaacatttttagtattctctttcacacaaaaatcctttccacaaaaaaagaaagagcaaaaaacctttgtttcctattctttctttaattagcacagctaattatattaatacgcatactatcaaatatgctgagtatatctaatattaaagacgcttagctaaatcgtcgtgtaagttttcgtaacctggcttgttaagtaaaccaaacatgttacgcttgtaagcttcaacacctggttggttgaatgggttaataccgttcaagtaacctgaaatagcaattgctaattcgaagaagtaaatcatgtaacctaaagtatgtgcactttggtctggaatgttaacagtcataactggaacaccaccatcggtgtgagccaaaacaacaccttcataagcacgatcgtttacgtagttcaagctcttaccttccaagaagttaagttggtcaaggttcttttcatcgcctgggatcttaacatcatgacgtggattttcaacacggataacagtttcaaataaattacgtaaaccttcttggatgtattgaccaagtgagtgaaggtcagtagtgaagttagcgcttgatgggtaaatacctttttgatccttaccttctgattcacccattaattgcttgcaccattcaccgaacattcttaaacttggttcatagttttcaacaatttcagtagtgtaacccttacggtaaaggatgttacgaagtgctgcgtattggtatggagttgcctttgacaaatcagtatcagtgtagtcagcacgtgcgtctgcagcacccttcatcaattcgtcaatgtcagcacctgaagcagcgattggaagtaaaccaacagctgaaagaacactgtaacgaccaccaacatcatcaggaactacaaattcttcgtaaccttctgcatcagcttcagtctttaaagcacccttttgacggtcagtagttgcgtaaattctcttagcagcttcttccttaccatacttcttgattaacttgtccttgaagattctgaaggctactgatggttcagtagtagtacctgacttagaaattacgttaacactgaagtccttgtcgcctaaccattcaatcaagtcataaaggtatgagcctgaaagtgagttaccacagaagacaacagttggcataccgttcttttccttgccatagaaattgctgttcaagaattcaattgcagcttgggcaccaaggtaagaaccaccgataccaatacaaatcaaaacttctgaatctgattgaatcttcttggctgccttcttaatgcgggcaaattcatccttgtcatagtcaactggcaaattaagccaaccacggaaatcgttacctgcaccagttccatcgcgaagttcagtgttagcagcgttaaccatagcttgcatttcgcttaattcattttcatgaacaaattgtgttagtttactactatcaaatttaattaaactcataaatctgcttcctaactaaataaaatatttttcacaaacctattttaacaatcttgatttataaataccagtacattataagcgcattcaggcttttttgacaattttaaaaatcacataaccccaaattgctccacaagtattgaagaaaacatcatcaatatcgctaacccccgtcaccagcaaaaactgcagagtctcaattcccactgaaaacagcatccccatcagtaccgtccttaaaaacgttgctctttttgaaaaaacaatggggaaaaaaatgccaaacggcacaaagcacaagacattgccaaaagaattataaaagaaatccaaatgactgggagcatagactaatttccaagtttccttcatgaataccaagttaatatcactcaatggcctagagaaattaaaatcaagctgccacggaaagtaggtatttctaaaagttgtcagcatcaaaactaagattatgtaaaaagaaaagacccaaacgctagcttcagacctaattgatcttctgcggcgcaccaaaagaagccaaattaagcgcaatacagcaaaaattaaaaaataaaatattgttttatccagcgctaataaggttaatttaactaatgcaaagtggttaatattagttgcatactgtttagctaaaaaactataaagtgggcccaaaaatagcatactttgcctctttccaaaatattcattatagattatacctattttcacggctggaaaatcttaaaaaaaagataactcttagcaaattattgttttaaaagaggtgaaccattaaaattaaaagatgttaaaggagcattatatggaaaaaaagaaaattatcagttttattcaaacacgaacgggctttttaacccttttagttgtttgtttctggctgaaatatatttttgcagcttattttgatttcaatttaggcttgagcgacccgtatcaacatttcattatgtggctcagccccgtagggtccgccatcattttaatcagcttcggtttttatattcctaaaccgctgatctcttacatcacaatgttaattttagactttgccaatacggcattgctttttgcaaatattatctactatcgtcaattttcggactttttaacaattaaaacgatgtctaacgttggtaaagtttcgcagggtctaggtaaaagtaccgttgcccttctgcatccaacagatattattatctggattgatttgatcgttattgttactttactgatcattcataaaatcaaaattgatcaaagatcttacggcttatccaccccatttgcgattacctcagtaggcgcatttgtcctaactcttaacatttttttggcagaaacctctcgtccgcgcttattgcgcaacacttttgatcgctcctatatcgttaaataccttggtattgacacctttactgcttatgattgcttcaagagtgcgcaaaatgttcaagtcactaaaaatgccaacgctgcggacttgaaccagattttaacttttaccaaaaaacaaaatgctgctccatcttcctcatattttggtattgagaaaaaacgcaatgtgattatcatccacttagaaagtttccagcaatttttaattaatcttaaggttaatggcaaagaagtgacgccgttcctaaattcactttatcaaaataaacatacgctcagttttaacaacttctaccaccaagttggtctaggtagaaccagtgacgcggaaaacatgctagaaactagtacttacggtattcccgacggatctttattcacttctttaggttcggaaaacacctttcaagctgcaccgcaaattttgcgtcaagatggctatacttccgctgtctttcacggcaacgtcggtagtttttggaatcgaaatgatgtttataaaaatatgggctataattatttctttgataaaaattactatagctcccaaagtaaagatgcaagcggctatgggttaaaagataagctgctttttgccgaaagcgttaaatatttagagcagatgcagcagcctttctatgctaagttcattacggtaaccaaccacattccgtttaacttagataaagaagacaaggaccctaactttaagactacaaacactgccgaccaaactatcaacaattactttgaaactgcccactacctagatgaggcattgcgtgaatttttccactacttaaagtcttctggtctttacaaaaactcaatggtagtcatttatggtgatcactatgggttaagtaattctgaaaatgaaaccttagcaccaattattggtgaaagctctgacacgtggaatacttacaataatgttcaaatgcagcgtgttccattcatgattcatgccaataatttgaaaggaaaaattaatcatgaaattgctggtgaaattgatgtcttgccaacactgatgcatttgctcggtattaacaataaaaactatgtccaattcggtagcgacatgctttcgcctaaaagacaaaattggatcgtctttcgtaatgggaccattgtcagctccagatatatcatagttggtgctaaaggaatcaaaggtaccgtttatgaccgagttagcggtaaacaaatcattaattttactcctcaagagaaaaaagaaatctctgagctagcacaaaaggccaaggcatcattagactattctgacttattaaacaaccacaatttgttacgcttctacaccccaactggctttgtccctgctgatccaacccaatttgattattccgtcaattatcaaaaaatgatcgctatcagaaatgaattagctggcaattccacctcgctttatagcagacatcgcggtacaactactaatctttaccgtactgatgccgctgaactaaaagatagaaaacaagaaattacccaagttcctgacagcgttaaaaatattaaagagaatacgaaaaacaaaaatagttcagaaaataccaataactaaaaagaacgcacagacctttcaaaaaaactgtgcgttcttttttagtttttagctacaaactgttcatagcccttgtcataaaaggtcacggtgaatgtggaacctttacctggtgcggaaaatacttctactttgccaccatgttgcttaatcaaagaagaaacaatcgcaagtcccaagcctgattcgccagttcccattcgagcacgcgatggatcagccttgaaaaagcgttcaaaaatatacttagtctgattcttgctcatgccaataccattatccttaaccgataattgtgttccatgctctatccgtttacccgaaataataattttgccatcatgagtgaattgaatcgcattttgaactaagttaaccattacctgggtaaaacggtcacgatctgcataaataggcaactgatcaggtgcctctacaaccagctcatcgttggctttagttgcattttgttttaattgcgacttcaaatcatgcagaataattgtggcattaaagttagtcttaaccagcataatttgattatttcgaatcttttcatagtccaaattttcattgactaaccgaattaatcgtttagtttcgcgctgcattaacgcgattgacttcggtttagaatcctctgggatagcatcgtattgcaagccctctagaatgccattaattgttgtcaatggcgtccgcatttcatgagcagcatcagccatgaattggtctcgtcgctcttcttgagccttaacctcttcgttcgactgcttcaaagcctgcaccattttattgaaattctcagccaattgatcaatttcatcgctatctttatgctcaatttgcacattaaagttacctgatgcaactttttgcgtagcacgtgataatcgcttaattcgtttagttgaataataagaaataataaagctcagcaacaatccaaccgctacagtaattaacaatgcacgcaacaaattgcgtttagccattaaaatcggtcgctcaacatgctttactctcgatcctatccaaacaatgccaacaagatttttgccattcatccatggaaccaaaacccccgtgtaggcatccttagttgaactaatcggtgaattttcattatgattattttgaattctaatctcttgcccattttttaaagtagtaaaaacttcttgtgaaagctgaattctagcctttgttttgggataaatctgctcatttttatcattaaaaatacgtaaatgagcatcatcaccacgaagaacatattctaattgattcaagaagttattgctaagcaatgcagtcccattttggctatcagcttccgccaagtttcccaaagaattagcatagctttccatccgctggtagttttgcgtataagcttgattacgcgcataaccaatctctgagtaaccaataatcgagatagttgtcacaataatgagtaagaaactcaacatattttggtaaattaatttcattatttgacctgcgaatcatcaaacttgtaaccgacgccccaaacagtttggatcaccttggcaccaaccttctctaatttctgtcgaagctttttaatatgagcatcaacagttctttcttcaccataatactcatagccccaaactagttctagtaattggtcacgagaaaagacttgtttaggcttttgtgccattgtatacagcaaatcaaattcttttggtgtcaaacccattaccggctgattatcaaataaaacttctcgtctattttttgaaatcttcaaatgatcggtcgtaatctcatagtcttgattatcttcttgagtatgagctggttcttcttccatcatcacgcggcgatgcaaagccttaatgcgggcaatcaaagcaattgggctaaatggcttagtgacatactcatcagctccgatacctagccccaacacttgatctgattcactgccacgagcagtaagcataataattggcactgtcggcgaaattgcccgtacctctttagctacttgaatcccatctttttttggcaaattcaaatctaacgtaatcagatcatacttatccgcgttctttttaaacatatcgacggcttcgacaccatcaacagcaatgtcttgttgccaaccttcttttttgaaaaacattcccatcatttcagctacggaagtgtcatcttcgaccattaatattctcaaactcattatcaatccctaaatccttttgttctcttatgcttcacttgatcaggatcgacatagtcatgtggcaattcatgtcgtttagacaaaaatgttttcaaacttttttcggtataaacaattggcaataagataaataaataaaatgttaacagccaaatgagaaaatagcgatcccaattcaaatagtgaatgattactcctaacagtgcttgaataaacccaaacaggatacaataccagcttgcccgtttctgagcaaacttaaaactatcctggttaacttgcgcaagataagataaatagccataaattcggttgggccttttggctggcgtaatcagccaaatcaaccctaccgccaccataactaagccacaagcgacatagatcacgatttctcactcctaattctgataaatttaaacggttattcctcacctggtgcagacataactattctcattttaccagtgaaagtgaaattcttcatctcatttggaataattaaattagttcccatcttcaaatcatatgacttgccatcagcttctaattttccttcgcctttgataacggaaactaacaggtatggatgatcctttaagccggtcttccaagtaccatcaaggtcaatttgccacaaataaaagtgtggtgaaagtggtggttcaaccaatgtcttaatttctgcatcttgatcttggctagtcttaacatctaacttaggatcaacatggggaacagtggtcacatcaattgacttttgagtatgaagctcacgctttttaccatccttgcccacacgatcgtagtcatacaagcggtaagttacatcacttgactgttgagtttcaattactaagcatcccttagttaaagcatgaattgtacctgctggcacatagaagaaatcgcctgctttaaccggaacttttctgagcagcttatcccattcgcctttgtggatcatatcagctaattcttcacggctttttgcatgatgaccataaataatataagcacctggatcagcttgcattacataccaagactcagtcttaccagaatcattttctactttgcgagcataatcatcatccgggtgtacttgaactgataaattatcattagcatctaggaattttaccaataatggaaattccttggccttaggattgccaaacaattccggatgcttcaagtaaacatcccgcaatgacattcccttaagtggcccatctgttacagttgacgcgtcatccttgtaacctgaaataatccaagcttctccaacttttccttctggaatatcatagtgaaaaatatcatctaatttacgtccaccccaaatttttggcctaaagtatggggttaaaaataatggttccatttaaatcacctcaattaaagtataaactttaaggcagaataaatgaaacccttttcttagatatatgtatactatttgttttacatgtaaagctacttgttatacttacgaatacctgtagctaatctttgcatcccatccttgaccatcgtcaaaggacaagctagattaattcgaataaaatcatggccatttccacgataaacactaccagctgaaataatcagcccagtttcttggcgaatgaactctgctaattcctgtgaatcagtactgatcttttgcacatcgatccacatcaaatatgtcgcattgcccgaaatgatttgtacttcaggaatgtttttttcaataaaattctgcacatacgcaaaattttgctttaactgttttttcaaagcattaagccaatcatggccttgctcataagccgcaatcgttgctggaatcgccaataaattaggctcggctacttcatcactatttaaaccgcggttaaccatattgcgcaaattttcattaggaacaattgccgtagcagaatgaagagcagcaacattaaaagttttgcttggggacactagtgaaatcacactattttgtgcttcacctgttacagaaaaggctggcgtgtaatctggaccttgtctaaccaaatcaccatggatctcatccgatagtaatgttacatggtattggtgacaaagatccgcaattttttgtacttcttcactagtccaaacttttcctactggattatgtgggttacaaaaaatcatcaaagtcgttagcggctcagctaatttttgttccaagtctgcccagttgatcgaataacttttaccatcgaaagctaaatcactcgacaaaacatggcgcccattattcaaaatggaattataaaaaatattataaactggctcttgtactaaaacattatcaccaatatgtgaaatacggcgtacaattgatgaaatagcagggactactccagtagtaaaaatcatccaatttgtttgtggccgatgattatgttctgtttcataccaatcagcgacagcattaaaataatctgcttgtgggaactcataaccaaatgcacctaatgtcaatttttgttgcattgcctcgataatttcaggtgccgtcttaaagtccatatcggcaatccacattggtaattcatcagacttcacatcccactttactgaatcagtctttgacctatctggtgcattttcaaaatcatattgcatatatctcactaatcctttggtgtttggttcgtatcagaatgaacaatttttgtacctattttcggacaatcaagctcggttttagatggatctaccttatctggatcgataatcaaagtaccaatctcaggtaccgtaattttaccagaaattgggtttttaatactatcaatctttgtattaagctccacatctaaattagaaacatattcaaaagctaaatctgtatgaatcaaggaaccattcttaatctcaagctgatcaatgtagttcaagccctgatcactttcaattttacaattaattaacgtaatgttgttagtattccaagctaaatattcaccatcaataattgaatcgtaaatagtgacattattgcaattccaaaaagcatctttagagataaaagttgaattatgaacttcaatgttttctgcaccatcaaaaacataatttcccacaacggaaacgtgatcaagataaatattctggctatctttaccaaaataatcaccattaatttgagaattggtaatcttaatatcattacaagtccacattgtttcttctgcgttagcaaaatgaacattatctaaaataatatgacttgtccttctgaataatttaggtgcctgtaaagcactatttttaattgaaatattcttggtataccaaattccagaccgtgacatagtttcaaacgtggtattttcaactttcacattttcatcataccaaagtggatatttccatttaaaaattgaattctttaatctgatatttttagcttcttttaagggagattcaccactgccaaatgtaataccatcaaggattgcatcagttaatccataaagaattctttcacctgcaaaatatttatttttgtattccataattgtttccacctttttgttaatttaataatcattaattttaggacagtattcattatatgatttctttcatgcaatgtttaatacttatttttagtgataatgcataacaaaaatgcatagcagataaacgatttagcaaaacaaaaaaccgctctagaacaacatctagaacggttatctatggagatgaggggagctatctttacttttagttacttttaattacttctaagtactgaaattaagccattttgatgtttgttggttttagttaattttgaagttggatacctttttggataccctggctaacaataaaattcagacttagaagctttgtcttagctcccaatacaaaaaagtcattctatgaaacttgattctagaatgacttttaatacaacaatacatatagtttaaatatatgttgttagaattcattgtctacaacttgccttgcaaaatcacatcattcaagaaactagaagatgagctatatccatgttcttttgcaatctctgtcaatttagttcttgcacttggcatcaaactaaaagtgtaaggtcttctcttttctcttttaatataattacttgattctttagaagatatttccttaccagagtcatcattaactctaggtgtttccttcaatacttctgcaaactttttgccttgatttgggttaaaactcatagaaaaaatcccccttaatcattactgtactatacctaatttcttggtacccaaaacaacatatcctggcgcttgtttaaaagtcgtcatataagtgatcaagcaatgaacctcacgccctgtgtaattttctgttgttggatcatattcttctagcaagagtaaatcacctacttgataattacgatcattttttctaatttcaaaatttttagagttatttacttgtgcttcaaaatagctcgggaaaatttttaccctatgttctttgatctcgtatacgccactcgatgtatatactttcattagcattacctcatattttatttatacattacatatacttagtttatatttaatgtatatttgctttatacattatttgtaatgggagaccgtaaaatagtttgtgtaaggatgaatgattccttaaatttatttctttaaacattagaaaaaggagttcctttctcgtatgattggtttgaacaaaaaaacacatacagaaagaagaactccttcatgaatgattttaccaaagattttgctcaagctctattcaatccagacaaaataaatgatttattgcgcaaagagctacaacaggctgttaataacttgctagaagctgagttgactgcctttctaggctatgatccctatgccagaaatggctggaatactggcaattctagaaatggtgcttatttccgcaaggttgatacccagtttggaccaattgaagtgcaagtgcctcgagaccgcaacggtcagtttcatcagcacacgctgcctgactacaagcagcactctgatgttttggaaagcacgattatcaagctctactccaaaggcgtaactaccagagaaatcgctgacttgattgagaaaatgtatggcagtcattatagtccagctcaagtatcaaatatttccaagcagatgctccccaaggttgaggcttatcacaagcgcaagctaagcgacaagtttttctgtgtctatttggatgcgacataccttcctttgcgccgagaaacgtttgagcgtgaagcagtatatattgccattggcattaaacctaatggacataaggaagtcattgactactgcattgctcctagtgagaacattgaagtctggacagagatgcttcaaaacatgaagtccagaggcttgaagcaagttgaactctttctttctgatggtgttgttggcatgaaaacagccttggccaggacttatcctaaagctcattttcaacgctgcctggttcatgtcatgcgcaatatctgtgctaaagtccgggtggatgaccgcgaaaagatcatgaacgaattcaagcagatacatcaacagacaagcaaaaaagaagctgcagctgtcttgcacaaattctatgccagatggaataaagcttatagcaatgtcatcaaaggtttgaaggaaattgagcccgatctgctggtcttctacaattatcccaaacaaatcagagcttcaatttattcaaccaatatgattgaatcctttaacaacgtcatcaagcgtaaagctaagcctaaggcagaatttccaactgaacagtcgcttgatgcatttattggcatccaggcaatgagctacaatgaccgctatttcaaccgaattcataaaggctttggtcaggttcaggataccttagaatcttattttgaataaataattaaaaaatcaatttgcgagaaagaactatttacacaaaagatttgacaggttctattcatatgctatgtataagttatttatgtttaacttatatttatattatatatcatatttacaatatttcaacaactatcgtttttatttttataagaattcaagtgtaaaattaaaaaagataaaattgctgttttccaatgtcattaagttaagacattgacaattaagggtgcttttttagagatcgaatcatttggattcgatctctttttttgtataaaataaaggcgaaaagaccagccttttcgcctatcttatatattatatattttaaaccttcaaaattattgccagaaagatggtgttaattatgaaagcccttcataagaatattctagaacgtcttgatcaaattatcaataatactggggatcatattcacgattttattaataatcctcatgcttttaccaggaaacgcactttagatgcagcgacagtccttaaaactacaattaacatgcaaggtcagaatttaaacagtgaactctttagagcttttggcgaagatgcaactaaaaagaacgataaagtagttagtacttctgcctatgttcaacgcaaaagccagctttctcctgcttgttttaaacatattctgactgtttttaatcaaaatctatttaatattcaactttttgatcatcactaccgtttgtttgccattgatggctctgactttaatcaaatctggaatccgaaatcgaataacattgtacaagcttcttctcataaaaagaaaccctattgtcaaattcacgttaatgccttatatgatctattgaataatacctaccaggattgtatttttcagcctaaatcagaaatggatgaacgcaaagcggctgttcaaatgcttaaagctttgaattgtggtccatatattgtaacaatggatcgtggctacactagtttcaatatgattgaaaactgcaatcgcctgcctaactgtcattacataatacgaactaaggctggacaaggcggagttaaagaaataacgacattgcctgatcaagaatgtgatcgtgagatttcctgcctggtaactacttctaactattactacatcacgcataaagccagtgagaatattcaccatgtccagcatcattatcgccaatatattaagtatcgctctaaaaatacccaggatctaagctgggattttggcgagttatgcacaataaaatttcgagcctgcaaatttagaattaatgatgccaaatcaggcaaagaagaatgggaagttgtgctaaccaatcttgatcgaaaaaattatccgctaaaaagaattaaagagctttatcatctgcgttggggtattgagacctccttcaagaaattgaagtattctttaggcagtgtacagttccattccaaacaagataaatttattgaaatggaaatttatgcccatatgattatgtttaatgcaatcagtcaaattgatgcacaggcctatattccgcaaaagcattgcaagtatcaatatgccatcaatttcaagcaatcatgcttgattattcagagcatgtatttggcttcttctttaacgcaagattttgaacggatccttattcagatcagctattataccattccaattagaccaggccgcaaggacaagagaaatattaagcccaaatcagctgtatattatttatatcgcgtagcttaaaaaagcagaatctgtgctatgccttatttgttgtacgaaaaaagcaccaatttaaccaattaaatgttaaatcagtgctttaaaagtctaatattaattgtcaatgtcttaacttaatgacattgtgctgttttctaacaccttctattttttaagctttatttgtaccataatgacatcatttgtatgttataatgatgtcatagcgtaaaggagtgattgttatgacatcatcaactacaatccgtcttgatgacgatttaaagagaaaaatgcaaaagattttagatgctgcaggcctttcaatgaatgcatactttgtaatggcagctaaacaactggttttacaaaaaaagttccttttgaaatcttgactgaaccagaaattcctaataaaacaaccgaaaaagcaatgcttctagctgatgccaaagatgagggcttggttacagatgattcgcctagttttactaatgtcgatgatttaatgaaatctttggatgagaactaatgtacactatcaaatacgagccacaatttaaaaaagactacaaaaagttcaaaaaagaacatccagagttaataaaagattttaagaatacagttattcagttaacccaaaaaggaaaagtcggaaaggactatgaccttcatccgttagataaacgtggtggtaattacagtggtcattttgattatcatttaagtgaaggaacggtcgatgttgtagtgatctacaagccacacaagaccaattcaataattagatttgtgagaatcggaaatcatggagacctatttgagggtaaagaaaaataaactatataaatacggatatatcagtatttttgatatatccgtattttgatatacgaattagaaatttagattttattctttttaaaactccgctcaccatgttgaaaaatcgataaaaacaatgctaaatgtagaaaaaagaaaaaatcatagtagtaagactttaaaaaggacggtagaactactttaagtactacaaattacaacaaaaattttataaacttctacttcattaagaaaaaatcctgtaatacagggctttttaagctaaaacgcaacttttacattttattaattagtgattcagtagttaaaatttctctatccttatactttacagcctcagcaatcgtcagtttttcaattgctctaatgtacttctccatgtaattaaagtctaaattttttgtattacttacaactggtaatcttacactatcacttcttattttggcttttgaaatggagtcatcccaactatattttttagataaagcttttctaacacttcctacaaaatattgttgaattagagggcttttatatcttgaatctttaaaatatagtgccaaattatgactatcattcgaacaaaaatctttttcttgataagttactaccatagtttttccaccaatgaaaacgcaattgccctcatcgatccattctttaggacaatttatgtattttaaaacagcattattgccttctgctgctgtcaagtatggcacattgccattttcaaggttagctacttgactcttcaatatactatgagtattaactacattaaatagatcaactattttaaattcttgaaatattggcttatatgctaatattttcttgtcttcatcagttagtccatagtcatttaatcctgtagcttttaaataggaatcaagctcggcgagccgttgctgttcaagctcggctatatattgttccatataattaaaatctatttcatctgcatcagttacaggtagcctcaccttagagtctctaaacacattatccacgtgtctaacaagaacagacagtaacaccttagacaatctactaaaaatggtattaaagtacaacgcaattttagtattaagtttaaatttgggaataattttccttacgaactgtcctgcataccaagaacgttctcgataaaagaaagtcatttgtaacagccccaaactaaacgtattaggttcattgtaggggacatcacatacaaagtctgttgtgctttcaatgccattattcaaagatgttcgggtaacatagtcatattcatttgtacttatattaggatttactaatttagacttgttgataccttttaccttttgtatttcaaataaatcacctaatttaaattccttatacttaaccattctgaccacctataacttgactaaccttccacgatagataatctgccacagtccttttaaagtcctcttctgcaggtgttgtgtcaatttttaaatgctggttataagtccaatcattgccttctagagtgattgtatctttaattactttatggtttcgttcagtatagtaattcgttttaggctttttatcactaacaattgcaactacttcttcataacgttctttggcatgatctgtatcacgtaaattaaccttctgaccagattttttacggttcattctagtatatccatcttcactaaaatctaagaaggttactaaatcatcttcttcatgtggtctagctactttaaatacataaatagcagtctgaacactagcttttccaccaaataaatcagttggcatatgaatagaggcaactaaagtattatttttaagaatattttttgtgtaaggcagcccgttgccactaccagcgttttcttgaataataattgccgcatagccttttgtcatttgtgacaatgcttcttgaacaaaaataaaaccttttccttctgcagagtatggaggatttagcaaaaacacatttgctggaaactgtgtgtaatttttatacagctcatgactattaccattaaccatattgctagatccatctcccattaggatcatgtttaaaacggctaaaatgtaaatattgcccagtatttctacacccagtaattgattttctttaatattttgaatcttgcactctagtttctgtttatcttgaattgtatttttagcatccttaaccataatatccattgcagacactaaaaatcctgcagatcccattgccaaatcccacacaaacgaatctttatttgtatgagctaacctagccatcatattcgttatgtatcttggtgttaaaaccacatcattttgacggtcattatcaattgatacccaatcatttagagagttcaaaattttaccagtaaaatctaaatgcaaatttgattcaagcaaaggaagtatatcattatagacttgcacatatatcttatgaatcaaactttcaccatttttgaaactgtcaaatcttttgtgtaaatagttctttctcgtaaattgattttttaatcatttatttaatcaaaataggattctaaggtatcctgaacctgaccaaagcctttatgaattcggttgaaatagcggtcattgtagctcattgcctggatgccaataaatgcatcaagcgactgttcagttggaaattctgccttaggcttagctttacgcttgatgacgttgttaaaggattcaatcatattggttgaataaattgaagctctgatttgtttgggataattgtagaagaccagcagatcgggctcaatttccttcaaacctttgatgacattgctataagctttattccatctggcatagaatttgtgcaagacagctgcagcttcttttttgcttgtctgttgatgtatctgcttgaattcgttcatgatcttttcgcggtcatccacccggactttagcacagatattgcgcatgacatgaaccaggcagcgttgaaaatgagctttaggataagtcctggccaaggctgttttcatgccaacaacaccatcagaaagaaagagttcaacttgcttcaagcctctggacttcatgttttgaagcatctctgtccagacttcaatgttctcactaggagcaatgcagtagtcaatgacttccttatgtccattaggtttaatgccaatggcaatatatactgcttcacgctcaaacgtttctcggcgcaaaggaaggtatgtcgcatccaaatagacacagaaaaacttgtcgcttagcttgcgcttgtgataagcctcaaccttggggagcatctgcttggaaatatttgatacttgagctggactataatgactgccatacattttctcaatcaagtcagcgatttctctggtagttacgcctttggagtagagcttgataatcgtgctttccaaaacatcagagtgctgcttgtagtcaggcagcgtgtgctgatgaaactgaccgttgcggtctcgaggcacttgcacttcaattggtccaaactgggtatcaaccttgcggaaataagcaccatttctagaattgccagtattccagccatttctggcatagggatcatagcccagaaaggcagtcaattcagcttctagcaagttattaacagcctgttgtagctctttgcgcaataaatcgtttattttgtcttgattgaatagagcttgtgctatattttttgtaaaatcattcatgaaggagttcttctttctgtatgtgtttttttgttcaaaccaatcatacgagaaaggaactcctttttctaatgtttaaagaaataaatttaaggaattattcatccttacacaaactattttacagtctcccatttttaggttgccataaagcttgtttagtaaaaataggttgtaacaaagccataatcatgttaattttgctattttccgcttttcttgcatttaggaaatctgcaatatgatttaagataatttgtccatcattgtttctttcagttatatttccttttaattcagcaggctctaactgtgatactccttttgtctgtagccccgccatgattaaaccagtaaaaacatacaatttttcattagttgtcagtaggttttgaattgacttatcgtcgtacaaagcttgatgaattgattttatccttttttctaattcatcctcagtttctaatttaattttttcgagttcatggtcatttagatttagtttgtctaatatgccaaaaagggtatctatattgatttgcttaaacaaatcaaacgatgaatctagctgtctaatatgttttggaacaccagcattagccttagaaatataataagctttctgctcaggatcttttaaattgccttcagtatctaaagtagtaccattaattcccattatgataacttcatcacagtctgagttatctaagatcgcatttccataatgcagagcaccattagtagcatatgtagtaattgcactataattaggatcaccttttttatgtggattttttgcgttcggcttagaatctgaaccaaatttagtcacttgaacaatttgaccagccttgtctaatttttctaacttatttttgccacctttagcttcaatcattactggtactcttcgtgaatgattatcttctaataataattgaatatcaggataattgttgcctgcaccaccagatttagattcagcttgtcgcaaggctgatgtaatttcactatttatttctccagttttaccgtaatgcctaattcctagactatcaagttcactcttaaagtattcttctactttttcttcaattgatctaaccatttatcgcaccgccttttgttgcatgcagtgcgtaaatgttgacaaatgaattatttgcccataattgatgcgatgtgatcattttattctcctgttcaattcttgcaatggttgattgaattgtatgtaactttttagctaattctgtttggtgttattcctgcgtttcttcaattaatttatctaatacccttttttatgggcaattccactagctatatgattttactttttttattatatagcatgtcaacaatagtttgccatactaaatggtttttaggatcttaggcatttgatctttatttaaaactaaatttgtgaatcctattgaaaagccgtcagaaacaacactaagtgtagaaaaaataaaaaatcatggtaatacgcgtggtgctagttaaattgttttagttaacaaaaaaagtccaatcttgttagactcgacttgtaaacatattaatagaaaagagtctgactagattgaactaccctaagcttaagcgtttttctcatcctaacacaagttagttttagttgtttaaatataatttatcgctgtttgtacaaactttatgccccagatgcattaaagcaaagacggaatatcaatcgatgtaaaatatctgacagttctattctggccttgcttatttggcaggctttattgggcgttgaatctcaaagaagattttgtgaaaagcttgttaatttatctcactctcgctttaatcgcagagcacgcatgcttttgccattgatctatttaattcgacatggccttaatgaggaagtagatctgtcaggcgacattttgattattgatagctttcctgtgccagtctgtcagccaattcgcaatcgtcgagccaagatctttcgcggctatgccgatattagctataaggcaaccaaaaaaatctattattatggttttaaggttcacgctattgttagcgacgacggctacttgctagattatatcgtaaccaaggcctcagttcatgatgctaaggaaacagtagaactgattactaacgctcatcctgacaatcgttaccttttgggcgatgaaggatatttgggcaaaaacctgcatcaacgcttagagcaaatgggctatacgctttggacaccatatcgtaaaaacatgaagaatgctcaaaagcacaataagcactatttaatggcactcagaaggaccatcgagagtgatttttcgcttttgtcttactacaacgctgaaaataatcgagctagaagtttagcagattttcaagagagactcgaagttgccattttagcttataatatggcatattgtctagaacgatttaactagcaccacgcgtattatataagtttatttagatacgcttagcatggtcttgtgaatgagcattgttttgaccataatatgcattctcaccatgcttacgataatagtgcttatcaagcaagtattgtggtaaatgactattagcgtgggttaattctaatgtatggaagtcctcttctgctacgacttctaacacttttgcattatatactgccttagcaggtgtttctccccaggtaaatggtccgtgctgggaaactaaggtgcctggagttgcttcataatctaaatgacgctcttcaaaagtctttacgatagtaacacctgtattaccttcataatcttcttcaatttgttccttagttaaggcatctgcagcaggtatatcggtatagaaagtatctgcatgggttgtgttcattgctggaatatccattttagctgcggcaaaagatacagcccaaggtgaatgggtatggacaataccaccaattttagggaaatgattatacagatacgtatgagttggggtatctgaagatggatttcttgttccctccactacttcacccttcaagttaacaactaccatatcgtcaggagttaattcttcatatggaacacctgatgtcttaatgacaaatagacccttttcacgatcaattccagatacgttaccccaagtaaaggttactagtcctaacttaggcaattgcatattggcttcataaacttctttttttaaatcttctaacatgattgaaccactttctatctcactgaactgagttttttattagtttatacattttatctgtatcagtttcgcttaaaatctgatcatataatctacgattagtaataatgttaattaactgtgttagtgccttatcatgctcatggtgaaagccaggaacaagtacaatgacacactttattttttcttctatattattaacggaaattttaataggtctttttagaattccaatttcaatttccatttttcttgtatgcttagatggtgctgcgtgcgctaagaatgtatcagatgaaagcaacatatatgggccatatttatcaattaaactcaagatatcatcacaataaccagaggtaactatattctttttttctaactcttcagatagctccttaataataggattcaaatccgttccattcattagattgtcaatgatttttatactacttctattcagaagatccatcaaattgtgtttatttttatcacgtttaacagtatcttttgtaggatatagataattatctaaatcttttcttagattagaaatattctttatttgagcatttctttgaataatgctaatcaaattatctaaagtcttttctctattaatgaataactgagggaaatagtatcttaattgattctcaacttttacatgatcctcactgtccatcattgccttaacttggactacaggtaaatcaatattttttgtatttaatggagaggttgtaatgattaatttagctgtattagggatgcgtaaaattttatttaattcatcgatacttagtgacttagaaaatgtgattaatggatattgtttgtgcaaattagaataaagaatagcagatgaacttacgccactagtacatactaagagaacttccgattgcaagctatctctaatattatcgtttctatctaaaacatgagatatattatctgatagatcatcgtatgaaatgaagtacagactgatcaaagcaatttcattaattgaaataggtttagaaaacagcttagctaatggactacaagataattgtacaaacttaaccatttctgggaatttatggacaacatcagataaagcttcagaattaaagtcaaaattaaacttacttctaaaataactggcatataagtgattacttaaggctattacaaactttggagattgaatttttatgcctgaaatagaagcgtatctattaacaatgtcttgcgctacatctaaaattttgtctttaaaagattctgtaacgtaattaactgcgtcggcttgcgagcaaagaattaattcactaaaaaataaaatttcacttttaattccaatcccatatctttgcgtaaagtctgtaactgcagataaaacattaacggtactctcttgaatatcattatctgttatatctatgtcaacaatcatatttcccatagaaattcgccatattctaaatttaagaattctctttaatttagaaatagcgttttcggtaaatcgtgaggaaatatcttcctcgagaatttctatatcactttttacttttgaatcttcaataattggaaatggtaacttatctattttgtgtgctattaatccactattatgtttttgcagctcattgaaaataaaacgacttttctcttcttcagaactttttagtagatgaccatttgagtcaatatttagctttagttcagaataattttgtcgaatgtccttcaaatcatttattatcgtatttctagaaacatccatatcatcgattaattgattaatagttattggactattctgaataaaaaatttccagataatttccttcaatctgttttgtttattttcgttatgttgaaggttcttattttcattgatgttttgttgcttccaagcacttatagcttgtgcattgagtatatagcctaaatttctaacattttttataggggtaatatcttttgatgttaataaagcattagccttttttatccgataaaagattgttcgttgtgagacatcgaaatagttacataattcatctaacgtcacatatcttttttgctcagcaaaataattaattaaattgcgggtgtcaattgattccatctattatccatatcctaaaaaaatcgttaagacaatatctaaaatacttgccttaacgatttctaactctttaaactaacctttgataatttcttctacttgatcaataacgtcatctacgccaattcctgtcaataatggcaagccatttaaaactggaatcttgatttcatcattgtcatattgagtagtagtaatagcagcatctgcttcatctgccattgattgtacttgttgtacacttgtttgaactaatttgtaatcagtaccttcgttaaagcctctatcagttagctcttcgtttaacttattcatggctgctgtactagtaacaacaccagcgccacatgcgacaataatctttttcataattaaatcctcctaactttattaagcttttttagctgcttcagcttctttttcagccttaataatgcagtgacggttccacattactaagataccacaaactacaataccaataacataggcaagccacttattgtgtgccatttggaacaatatccatgggaaaggattagattcatagtcaattgatccaattaatgttgagttctttggaatagcaaagtgagcagctctagcagccttagtaaagaatggtgataagttagtaccaatccacaaaccaatgattacgttaattgcaccaataataaaggaacggaagaagtcgccgtgtgttactgccacaatcaatgggaacatgaagacaaatccaacaagtccaatggttggtaagaatttattgcctggtaaaatgaaggcaaataccaaagataatggaatcattaaggtagcacaagccaatacaactggactaccgatacctactgcagtatccataccgatgtagaattttctaccaccaaagcgtttttgagtcaatttttgaatattattagatactggtacaacaccttgtaataataatgcagccatttttggggtgataatcataacggctgacatagttacacccattaacaaaatcttacctattttgtctggccaatccatacccggaacaaagccatatgctaagaatccaactaacaaaccaattacgaaacctaaaagtgtaggttcaccccagttaccaaacttcttgttaaagtctttagcatccaagtgaatcttgttaacaccagggatcttatcaataatccaattaattactacggcaaatggtacaaaagaacctgcatatccatgaggaattgagattcctggtaatcctaagtacttttcagacaaaggtgcagttctgtcggcaattaccatgattacgaccatgtttacacttgctaagaaaagactaagcaaaatgtcatcagtcaaggcatatactaatgaacctgtaaaagcaaagtgccaaaagtcccaaatatcaatatcaatggttgatgttgttttggtaaacagcataatcatgttgataatgatacccaatggaatcattgtaacacctacaattgaaccatatgcaattgcagatgctgaaggccaaccaacatcaataactgacaaattgatatgcatgactttaatgatttcttgaactgctggattcataacatcagttaatattgtaacagttgcatttaatcctataaagccgattccgaccattaagccgcctcgaagtgctttagcaaaaggtaccttcaaacataacccaaaaatcaaaaagataattggaatcattactgttggtcccaagttgactatatactggataaaatcaactacatatttcatttaattccactcccttttagttaaagtacgatgctaatgcatcatataattcttttgaatctttatattccacaagctttgacattagttcttgttcttggaacatttccataagcttttgcaatagttgcacttgactatgtggttctttcatagctagcattgctacaaatctaacttcaacatcttttgatttatcagccatatttttgaaaaacactggctttttcaatgtagcaaatgcaataactggcttattcacatacttaacatcagtatgtgggattgctacgccaccttcaccgcttggcaaacctgttggaaaaatctcttctcgatctaaaacagcttgcttatagctttcagtcacaaaaccttgcttgaataactgatcagctaatgtagaaatagcatcggtagaatcactaacatctaattgtgcaaatactaaaccatcttttacaaaactcaatcttatttcacttcccacttcattcatcacattcatagtaaaataaaaccgcttttataaatagttcaattagccaaataaataactgcaagttctgcaccccttttgcatgcataacttgcagttttattgctcttgtgaaatttgtactattctattacacatttgcctttgcagttttaatggtaaattacaaaatctataaccattaattctgaatgctcctgtaaattaattaattcgaaattattatgaataaaatcagaaattgcaataatattgtccgcacctgttattatttcttccttttttattagctatttcaactaaatcaatctttaatatttcgccattaagcaggtatcgttcgactattttagattgatctactaaattacacattttgaaccagctaagatgatttatttcaaaatggccaataatatatgcatttacagccatttctattgaaaatacgtctttaatcattttgaagccttcttttaaatctatgccgtttatttgctaaatcttcttgcattgccaagattattacttgtcatagattaagtttttctttttgtagaaagtcattacatgctttaatagcagcaagaacaaaattagtcatttttcctccagagattttgttacctacaggctgataatctatttcaccagtctcatacaataaaatacgcgtggtgctagttaaattgttttagttaacaaaaaaagtccaatcttgttagactcgacttgtaaacatattaatagaaaagagtctaactagattgaactaccctaagcttaagcgtttttctcatcctaacacaagttaattttagtcgtttgaatacaatttgccgtttgatatacaaactttatgctcaaaattcattgaaacatcggcgaaacattgatcaatgcaaaatatctgatagttccattttggctttgcttatctggcaagctaccctaggcattgaatctcaaagaagattctgtgagcacttttctagtctgtctcactctcgctttaatcgtagagcacgcatgcttttgccattaatttatcaaatccgtcatgctcttaatgaagaagttgatttatcagatcgcattttaattatcgatagttttccagtaccattctgtcagccagttcgtaatcatcgtgcgaagatttttcgtggctatgccgaaaagctactaaacaaatctactattatggttttaaggttcacgctattgttagcggtgatggctacctgctagattatgtggtaaccaaggcttcaattcatgatgcaaaagaaacaatagaattaattgccaatgctcgacctaaaaaccattatcttttagctgatgaaggctatttaggtaaagaactgcatcaacaattgatgcagatgggatacttactttggacaccttatcgaaagaatatgaaaaatgctcgaaagcacaataaccaatatttaatggcactcagaagaacgattgagagcgacttttcgttattatcttactacaactctgagaacaaccgagcaagaagcttagcaggttttcaagaaagacttgaagttgcgattttggcttacaatattgcatattgcctagaacgatttaactagcaccacgcgtatggtaatatatgaaagtacaaaagaagaaacatcttgcatatgcgagaaaattaagacacacaaaaatcgctactctaagtccacaaatgagtaacgatttttttgtttcaccaaagtttaaaacaaaaaagctatatgcattggctaaggatagtgacgcttgtgatgttttcttgagttttgcttatggattttacgcctatggctattttgagcaaaaatcaacttttacattttattaattctaattgctaatatacttacttaatcttgacgcaatgcacctttaaccaatctgcagcaaaatacatattctcttctgaatcctcactattagtaatatataaaataaactttaatgcatcgtctttatcagcttttaagtgatatccattttcttgtaaaaaaaacgccgctgcataataggaagtccgtttatttccatcagcgaagatatgctttttagtaatcttctgtaagataaaagccgcttttaaccataatgttggatataattcacgtccaaataatatttgttgtggctgtttaacaacaacgtctaacccctctggatactgcacacctacagtacctttaccagctttttcaagcaaccgttgattcaaatggattaaatctgttttggttaaatagatcatttattctctaactctcgtgttaattctttattttcttcataaaattgatcaataaagttgtccaaattgggattaattgaatcaactattttaaacgtgatcttcttaccattaggatcatattctttttcaagaactgttccatcttctacatgaaacttagttaaatcttgcttggttaaacgtacactcaatgaattaccagctttaaaaactttagttgtatcttgtaacattttaatcacctgctttgccatttaattgttataacgcaataatacgatgttataacgtgaatgtcaatattttaactttttttattatatagcatgtcaacaatagtttgccatactaaatggtttttaggatcttaggcattgggtctatatttaaaactaaatttgtgaatcctattggaaagtcggcagaaagggcactaagtctagaaaaaataaaaaatcatggtaatatgaaggtacaaaagaagaaacatcttgcatatgcgaaaaaattaagacacacaaaaatcgctactctaagtccacaaatgagtaacgattttttgtttcaccaaagtttagagcaaatatgtttaatgctttagctgtatgttatcacgaaatcaagtggctatcataatattgtctaaagtcctcggtactgaaagcacctgaagttatttgtacaatttcattaagcgctttttgctcactgcattttcgatatatcattagacgctttgttctaatcctaagcgaatgaagcatccattttatattctcatccaccagcttataatggctttcaattaaaagagcttttgcggctttttcatactcgtctttcttcatatactttctcctataaactgcttatcaagaacacggctaaattattgccaaggtgacttacgtaagagaaggtcaaatccttagtttcaagataaactaaagctaagacagacccacatagtgagtacaaaatggtatataaatcaatttgtggttcatgtaaaagtccaaaaattaatccattaatgagaacagcaataaataatgttgtttttttgcctggtttactaaaaaaccaattgaaaaaaacacctctaaaaataatttcttcaaaaagtggtccaattgcaatcagcattatattaataattggattcaactgttgctgatgtgcagctatgtttgcttgattagtggcttcccctttaatcaaaaatcctgctaaaatttgcaaaatacaaattactaaaaatccaagaaaagctaaactccaattttttaaagtaaatcttggcattctagttttattgtaactagtaaagtgccaatcattcacctgattaagtcttctttggtaaattccgtaggtcaagctcagtaatgcaaccgttaatccaaatataaatataacggcaacccagcttaattgtttggctctaatcataaataatccttgaactaccgcataaataaggaaagttactatcatttgaccaataccaattgatttatcaagaatcttttttttcatcttttagttcctttgatttttttatgtctgattttagataccctatcgacaagagaaaaatataaattattactgaaataccaaagccgaccgtcgcaaaattaatattggaatttaaatgcttcgtagaaaccttgcaaattgattgcgccaaagcacctgcgttagcagaaacaaaaaatgcaaacatagttgcaataaacagtgctgttcgtcttagaaaggacaaaatcatatttattttcataaactacctctacttagcaaatttctcatcaaaaccaaaatattttctgccattgtatttcttattgggattaggcttaatctccattcgataggtacctttacgaccattgaaagctacaatttgcttttttcctgccgcaattttcttaatctcttcaggggtccaacgatgacctcgatatgttttcttaaaatgatattctttaccgtctttatatgtaatcactacatagacatttgtatctacaggtttaggattaactctaaagccccagaacctgattttacgtctaccttctttcaattcttgttctatcaattttccagtagccgtaaagctttttccttgcttatcagtcgcttcaaaactgatttcttcacctgccaacaagctggtaatttcttcctcactaaaagcatgttgtccatattcttttttaaatttaatctctttagctaaaggcttatagattcctttaacgtgatcagtatcttcaggaaactctactttccaaccaactctggtaatctctttacccgtttttttacttttatacgtttgttcggctaaataagccgtatgttgttcttctttaccaaatttttcaatcgaataggtgatttgtttcccttctaaagcttcttgttgctccacttcagtagtcgtatgtccatcaaaaatcgtaactggtgggtttactgtttcatttgtttgagtaaagactccgctaaatctttcaattgcctttaaatcaccagctaattctttaacttgtgcatcttgatttaataatggggcattttctatcataactgctttatcatgttcaattgtcttttctgcaactgagtagaccatatcttgctttgtgggatcagccttaatttcattcaaaatgtcttgcaagcgttttgtaatttttcctgaagacaaataggtatctttagctaagcaagcaatcaatgcgccagttcctgttacttcaaaaacacctcttactacttttaattggggaataacttttttattttctttaccaattgcttgtaatttactaattgtttgcattttagtcgcaccagtacccaagttccatttatccaagttattcaaaatgaaagttaaagtaggtttagttggtggcgtatttgtaccttgatatacttcagggctagcgttttgagcaaaatgtgtagccttattttctgattgcttttcttcatttaaatcattttcgttaaaaatcagcttatagtttagttccttaggaacattaatcgtacttgtaaaatcaggatgatttgcaatatgggctttaacttgagtatatacatagtcctcagctaacattgctagatatgatttaacaactcgttcataaatatctcgaccacatttaccatatttgtcttcaactttttcaagtgattgtggtactaatttggtcggacgattggctccgtgatcctcactcttaattatgaattttttgcgtgggtctttatgacttaagagttttgaatcaattccaacgactgctgcaattttatctgcatatggtagtaactcgttaaaatcatcaatcgtaattgcgttgtcttctgttctcggataagaaacaatcttatcatcatacattttttgataagtatcagtaatttgttcagttgtatattccttttggaaaatcttacctaagtcagccaagttgactaactttggcggctgggttcttttttcagttgtgctatcaataataatttgatcttgagaataattagttaaatcttgacctactagatttttgtctgaaaaacgccaagtatcaccgtcttgatagtcacgcttaaatgtattgccgtttgcatccttataccttatttcatagaaaggctttttaacgtatgattttcttgctctgttttgctcatcaactaagcacgtaatatacgtctgcaagcgtcctattgaaagcgccttacctttattactataaccctgttctcttgccaactcagttgcaattcttgattcttctaatcctgttagaaaatcaaatctctgtcgtgattttccttttactaaaattccttgagcatcttgttcactaactgtagccttctcaggcttatgtaaggaatcaattacatagttagctgagtcatcacctttaaaacgaattcgccagacttcattttgccagtttaaataatctactatttcccaacctaatacatcaccttcaccagacgggtcattatcgcttgcaataataattacatcatgtccaggcaaattgctcttaatattatcaatgtatctttgcttggacttaataacttgctttgaccaatttaaatcgagaggattccaaggaaagttatctaaattctgccaatccgcatatttagctgcaaggttggggtcaaccatttcattaggcgcattgagttgtaataaatgtcctgcggcataaacaatatcatagggatttccttcaaattcgccactcattccacctaaataatccgcaaatttttctgcttgagactttttttcatttaaaataagtaatcttgtcacgttactattcctttctacaaaaaaagaatacctcacggtattcttcacatagcatactcattattcaaaaaaattaattaatggaggtaactatattatatatcatttttatgatatttaaaagcttagtaaacctgcttaatgctttccaaaataactttattcatttgactaattatctttctaaagtagttgtacaattgttgatcattgttacaattgaggtacttagaataccaataaaagtcgattcccttattttctaatctttccttttctttttgataaatcttatcactaattacataaccataatttttaatccaatcttgattaatataagtaataaagtcgcttgcctgatcatactttagtttttttacgtcaaaaccataattaattaatttctttttgatcacaactaaattatcaattctgttaagttgagctggtttgagactgtaaaatagtttgtgtaaggatgaatgattccttaaatttatttctttaaacattagaaaaaggagttcctttctcgtatgattggtttgaacaaaaaaacacatacagaaagaagaactccttcatgaatgattttaccaaagattttgctcaagctctattcaatccagacaaaataaatgatttattgcgcaaagagctacaacaggctgttaataacttgttagaagctgaattgactgcctttctgggctatgatccctatgccagaaatggctggaatactggcaactctagaaatggtgcttatttccgcaaagttgatacgcaatttggcccaattgaagtgcaagtgcctcgggatcgcaacggtcaatttcatcagcacacgctgcctggctacaagcagcactcggatatcttggaaagcatgattatcaagctttactccaagggcgtgaccaccagggaaatagccgatctaattgaaaagatgtatggcagccattacagtccagctcaggtatcaaatatttccaagcagatgattccaaaggttgaggcttaccacaaacgcaagctaagcgacaagtttttctgcgtctatttggatgcgacataccttcctttgcgccgagaaacatttgagcgtgaagcagtctatattgccattggcatcaagcctaatgggcacaaggaggtcattgactactgcattgcgcctagcgagaacattgaagtctggacagatatgcttcaaaacatgaaatcccgaggcttaaagcaagttgagctttttctttctgatggtgttgttggcatgaaaacagccttggccaggacttatcctaaagctcattttcaacgctgtttggttcatgtcatgcgcaatatctgcgctaaagtacgcgtcgacgatcgtgaaaagatcatgaacgaattcaaacaggtgcatcaacagacaaacaaagaagaagccacagctgtcctgcatgacttctataccaaatggggcaaggtttacagccatgttatcagaagcttgaaagacatagaaccagatctgctggtcttttataactatcccaagcagatcagagcttcaatttattcgactaacatgattgaatcatttaacaatgtgatcaagcgcaaagctaagcctaaggcagagtttccaactgaacagtcgcttgatgcttttattggcattcaggcaatgagctacaatgaccgttatttcaatcgaattcataaaggctttggtcaggttcaggacaccttagaatcctactttgattaaataaataattaaaaaatcaatttacgagaaagatctatttacacaaaagatttgaccctgaattgtcaaattaagtgcaacagttaggctatgaggaaatatattgcttgaagagttcttctgctgtgtgatattggaggattcggcgatatttgtggttaatggcatcagttgcctgttgaacataagcttttgacttgtctttcatgctcttgcccttagggaagaattgacgcaaaagaccattgcagttttcattggtgcccctttcccatggagaatatgggtgagcaaagtaaatctggcagcccttgatcttggtcatatccgcaaactcagagccattgtcaaacgtgattgatttaaaccaggcaggatgtctgtcaatctccttttgaagcagcctttggcatgtgcttgcccgatagtcaggaatcttgataactacttcaaagcgtgtggttctttcagtcaaagtcattaaagcaggctgattcttgcgtctgacgcctttaaccagatctccttcccagtgcagcggagcttttctgtcttcaatctctttaggacgctgttcaatggaattgccaagatgcttcttgtgcaaagcgtgaccgccatggctgtgatgacgcttgttcctgcgtcttttgagcttcataggcagatcaatattgcttatgtccagcaagccctgatcaatatagcgatagacagttggtgtgctgggacaagggtagcctggcatagtccttttgaattcaccaacgaactcatcgatgctggtggcatcaaatttagctttaaagcgtctggagagcattctcaaaaagacagcataatgcttcaatggattgcgctgatagcagtttttgcgacgcttctcataataaatctgtgcagtatcagcgtaatagtgctcatacaataaatagctgctgtctctttgcaggacgcttccgcgtttgatttcgcgactgattgtcgacttatggcagccaacttcttgagcgataacagtacgggaagttatgccggaatccagcattgcttgaatttgtccacgttgtacgctggttaattgatgatagtgcttagaaatgctagaatttgaattggtcataaagatcttcctttcttgatttttcgtcacttcaagtttaggtcttcatggcctttttgtttaacacttagtgttgcacttcaattttaaatccgggcaaaagatttgacagtttcgctggtttaactaaatcaatcacataataggaattaaacaaacctcgtaattccccttctttattaggtctaacaacgttgaacaatatatcttctaatcttgtgacttctttcataactgcctattatttctccttaccataatataagcatctcatttatatcatatattgaatttatagtatacgatattgcactaactaaaaaaataaggcaccagattatatattgttgcttatatattaagcataagtaacatatatactaattataaacacgcaaaaaacagccagctctaaatacaataactttaaagctggctgttttaacataaaattattttttagcggttttacgaagaaacttaactaatctatgtgtgtcttgatcacttaatctacctatataattaacattagtatcttttttagataccgaataacgtctataagtatcaatccacgaatgttttttcaaacctgtagtttcatattcttttatttcgaaataatgctttttaattttttcggatttattcttaaactttgtcgttatgtcaaagaaaaagaacttatcctcattttcttgtaatatgaatattggtcgtcttttaccacctgaaatctgaacgaagcgaacatatactgtagcaatatttttactcatcttttgatatccattcttgcagtttctcagggctatccagattctccgttgcccaatccttggttaagttttgaatttctagttcatctttctctcgttcagttaaattggttgagaatggtaacccattctcagcaataagacgcttataaaacattgtgatagcaatagtaggtgttaaccccagtttttttagaacagcattaccttcttctaccacaccatcatcaatctgtacttgaattctttttttagtaattaaagccatagtagtgtacctctcatatcatttatactgatattgtactactaaatcaatggaattaaactatataagagtaataattagaaaattatttagtcaccacttgctcagtaagtttcgaaagcttgcacaattttttcattattactgcttttttgtataaaaaaagcagttagctttgaatactaactgcttcacaattattatattttatttcatatttttgatactttctaacgatctaattcctgttcacttttttgaatagcaatttcttttgctttttcattggtcagcgaactgtttactgtagcaacatgtggcttgctagtttgcacttctttatcatcaagcaatttagacttttcttgatttttttcaatttcattttgtaaattgtcggttaacttgctatagttgccatctgctgtccagcactgcgttttattaaatgcatcatccaaatttctaactgtatctattgtcatacttttttcgatttttcttagtgccgtcaattcggtcttaaaattagttccattagtctcattgtcagtaacttcttgctccattttttctttttgcacataccattgcgagtgttcaggagtatctaagaagttttccttgacaatttgacccaatttttcttgttctttttcgagtaacttatcggtactattagttagtgtcttagtagctgaaccaacatgcgtcaaaatttgcccttttaccccacttggtaactcattaaacttttgtccgttgcttgtccaattagctatataatcaactgtctcttgcttaacatcaattccataatgagaacaataaagataacttgtaagctccgcttgcatctcttttaattctctaggcaggcccttttcttgtttttggctattatgtagctgtgcatgtcccaattcatgagcaagcactgatacattctccgttggagtgttgtatccatttaacacaatttcgttagtagccctgttaaagtatcccttagcattttgcggatccttatatttatcccgaatatctgcattaaatgggtcataagtaatgactggcattttcatgtcattagctacacttcttaatccattctctaaggagtcaatctgtcctggattcttcatattaaaatcttggtgtctattagggtaaagttctgggtatttttcctttggcatattggtttgtggagcatcgaatacagtgccaatcttataaaaagttttttggtaagtttctatattacccgcctcaattttttgtttttcgtctttagtggcagtctttaagttagctaattctttgttgccatccttatttttacgatagaaaactgtagctttagtaggaacaaatattttaattcctttttcacctctgttgaccttatagcccatgcttttaaactttgcaaatgatcccaccgcagtcgcacctgggcgctgcatctgaatcatcattgcatttcttgaggaatagttatgaaacttatccataaaatcaagcatttctacaactttctctggtgattgagtataattatctacttctttaagtagtccattttttaaatcctcaacggtttgagtatgtttctttttccaagctttacggtcaaaagtctttctaggtcgtctttcagactttaaagcatttttatccatatccattttatctttaacttgacctgatactaattctggttttgatttttgaaggcgatcaagatattatgactgaagtgaaatatcatcattaagactcgatatctctttatcagttaatggtgctgcccaatcagaagtaaaactagatttattccaatctacatcggctaaagttccactttctttttcactatcaataactttttgagttaggggcttaataccatttcgattaatcgtgtgccattgataatttccttcagcgcttggtgaaaaaagataatgatactctacatctgaattaaggtacttaccgtcattctttgatatatcgttaatcatcgcagataagtcatgatactgttttctaacaggatcatcgattctttgtccattagaattatattcatccataagtttagtagcagctgtaggattttctggaatatggttatcgttatagttccctgtttcaattaactttttggcatcgtctaaagtacgataattatctagtaaattttgtcctgtgaaagtaagtccaccatccatatgaaaatactgagtagtaactgaaccatttggatttaaaattgatacatttgatcgtgttgacataatttttcctttctaagaaaacaaaaaagacgcttcataatgaagtgtcctgactacatacaagttatttagtttttactactatcaccttctttctagtaattttaaatttacacgtttctgctgaagataatttactgtcttagctgagaataaaaaacgctgaagttttgataattcaatgatttcagcgttttttataccatctatttagaaactgtcaaatcttttgtgtaaatagttctttctcgtaaattgattttttaattatttatttaatcaaagtaggattctaaggtgtcctgaacctgaccaaagcctttatgaattcgattgaaataacggtcattgtagctcattgcttgaatgccaataaaagtatcaagcgactgttcatttggaaactctgctttaggcttagctttgcgcttgatcacattgttaaatgattcaatcatgttagtcgaataaattgaagctctgatctgcttgggatagttataaaagaccagcagatctggttctatgtctttcaagcttctgataacatggctgtaaaccttgccccatttggtatagaagtcatgcaggacagctgtggcttcttctttgtttgtctgttgatgcacctgtttgaattcgttcatgatcttttcacgatcgtcgacgcgtactttagcgcagatattgcgcatgacatgaaccaaacagcgttgaaaatgagctttaggataagtcctggccaaggctgttttcatgccaacaacaccatcagaaagaaaaagctcaacttgctttaagcctcgggatttcatgttttgaagcatatctgtccagacttcaatgttctcgctaggcgcaatgcagtagtcaatgacctccttgtgcccattaggcttgatgccaatggcaatatagactgcttcacgctcaaatgtttctcggcgcaaaggaaggtatgtcgcatccaaatagacgcagaaaaacttgtcgcttagcttgcgtttgtggtaagcctcaacctttggaatcatctgcttggaaatatttgatacctgagctggactgtaatggctgccatacatcttttcaattagatcggctatttccctggtggtcacgcccttggagtaaagcttgataatcatgctttccaagatatccgagtgctgcttgtagtcaggcagcgtgtgctgatgaaacatgccgttgcggtccctaggcacctgaatttcaatctcgccaaattgtgtatcaactttacggaaataagcaccattgcgagaattaccggtattccaaccagctctatcataaggatcataacctaaaaatgcggttaattcagcttctaatagatcattaactgcttgttggagttctttacgcaataaatcgtttattttgtcttgattgaatagagcttgtgtcatatttttggtaaaatcattcatgaaggaatctcttttctagtatgtttttcgttcaaatcaatcatacgggaaaaggattcctttttctaatattcagggaaataaaattaaggaaatattcatccttacacaaactattttacagtctctctatttaagccttggtgcgattctttaatgttacctatctaattcttgattttggtagaatgatttaattcttttagtttttaggtcattaatgtcaatatctttttgcgaaatttcgttgctcaaatgatacgcaacttcgttcttgctaggtaaagtttctatcattcggtccaaagctttgtcttcttgttctctagtatctgcacgataaaatctcatgaggctaatcataaattcagcgtggtctatgttgtcaaaaggaagggttaaataatctctggtttcccaggtatctcgagcagagtttgcggcaattagcgctgttcttttatttccgtcctggaatggttgaagcttggataagcttgcaaatactctccacgcatctttagtagtctgtttagacgagttgtattgttcaattatttcatctaagtcttcggggtagacgttttctggagcaaagtatgcacctttagctgtgcctttagggtctgtgataatgacaattgcgtcgtctggattataacttgcatgtcttaagcgccctggaatacttgggtcttcttcttcgctatgggtaaaggctttattaatttcaataattccttgtcttgtaaatccgaatttctttgctgcagctatgccatctaaagcatcttttaagatggcaccatcgtggtgttgatgtacaagcttagataggtcattaagatctaaggctctttttgtttgcaacacagtactactgtagtcattcatactaccaaaagagactatgaagtttgcaaggtctaggttttcaatcatttgttctcacttactttccgtttagttagattacttacaattttagcactatttaattaataatccttgtttttggagcggcacatacgcaagcggtatgtgcttcttttttacattaaattagcagttagtttttgattagctgctctttcttattatttatctttctaatctttgatctcttcttcgcataatatgatatccatgaggtatatatttaacctgcttattcaaagtttgttctaatctcttcactttttttctcctttacactacaataaatttaattgaagaagcaattttcaaattaaggttttgaattttcaattcaggtggctcgctgccttgtcgtatggcaaaagagagcgtagtgcattgcttttcaaaaagtccttcgatgtttggagggacttttcttttacactttttcttattgaatatgtgttaaaaaaagtttaagaatagcagtagaaattaaggatcattacttgatcatgttgcccactgccttgacgatatgctagtcagaatgtctattattcattaatttatcctttcatgttacaatgtaggtaaagatcacagtgcaaattaaagagttgtatttacaacttggctgcctactaccttagcgatatgctagcttaaagaaggcgaggaatagatcagtgagactcattaaagagcggcatatacggaaagcggtatgtgcttctttttttgcattaaattagcagctagtcactgactaactgctttttctatatgcttatctttctaatccttggtctcttctcaaataagccgatcgcttttcaaattcttgtcctggtaatgttctggttgtatgcttagatttttgttttccttgttgcattttccgaaaagcttttaaggtgtcattccaatctttacctaatttttcactaggtttacagtatttaactttaggaaatttagattgaatatctttaacaaatctttttccagcttcatcattatctacacctaaacctacacttttaagaattcgaccttctttttgtaattgtgctgctgtttgtgttatatacgagtcaaacacttcttttttaaggccatccattgaaacaaacctagtatttttcattccaccctttacttttaccttagacaagtcaaagaaactaattgcatcaattggtgattcaaaaaatctaatattttctggagtttttccattcatacctggtgaatcgaatgaaaaaccatatcccttggtagaatttttttcaatcattttgagggttcctcttctaccatatttttgatgattaatttttgtaccttgttttgatactcctttaacttgtcgtctatcttgaggatcaagccacaaaaaaagtgcgttacccaatttatcttgtgcaagcactttgtctctatgtaattgatctatagtttgactcgaaattccacgttgattgtgcaagtatccccatactcgattaattttattttctgaatctatttgatttttatcaaacttgaaggattctttttggacctgataaactttgccatcacctactccactagttaacaccttatccattgcctttaggaatttctctttttcatttaaattgctacctgacaattcatacaatgtagaaaagcttaatgcaccttttccatgaacttgtcttgaattccagtaaaaagaatttttggatggtgtaattaccaatgaatcatgttctacccctttaaattcatcgctgcctgtttgacgtaaatcaattcctgcactccttgcatattcaacaatactcgctgaattagctgccttaatttgttcctttgtaaaagtaagcatttatttttctcctattctttaacgtcaaaaaagcaagtagtaaaactacttgctaatttccccacctatacccgactaactatatagtcacaaattaagatgattctattctaattctcgttcaacttcattttgcaatttctcaaattcacgtaagttcttcttggtttcaatatccgcatttgtcttttcaaatactttttcttggttagatttaatttttcgtatttgactttgactgataaaaggcttttttaagtaaatatgtccttttagattttttctacgcttaataatatgtgaatgaagtgtatagtcgtcatttgattttatcttattattttgtattgttgtatccttacgaatttctttcaatgcggattgaatatattcgtttggatcaactttatctttaaaattaatcctatgtctttgattatggttagcttgcttatcaatttttcttaaatcagctagcaatgcgttaccatttcttgcataaattccttctttgccatatagttggttaattgcataattcttattttcacgtttacttttaccatataagtcttgtcggtcatcttgcattttccaaactaagtctttatatttttgaaaatcggagttatattttagcaattcatcaaccaaatgatccgacatctttttttgatttttatctaacttgttgtaaaaccattctcttcttgactcaggcaatgctctaacaaattgatttatctctgcttgaaaagttggctgttcaacttgactagtcaaattaacctgaattgcttctctaatagcttgacgtctctgagataattctttagtcatctctgaagaaccaatcaactcattagcaaaaccacttttcatatgatcaattattttttgtggtcgcctacccttaggttgactaatcccttcacggtttataatttttcttcttgggtctttctcaactgttgcaatgtgaatatgaacattatcagtatttctatgaatggaagccacccagtacatctcatttaatggtggatccatttccttttgaaaaatactctgcatttttttagttgccttttgtagttcttcctcatttaatattccagttgtactagataaaatccccttcttttttaaaaaactattatcaaaactaacaacatcttgccacaagacagaattattctcttgtccttcatttaattgctcacgaatataatctaaatctttcaactgaacaatatctttgtcagagctaaatactccatctaaaactttttctttggttggatgaatttcactcagcttacttgcagcttgccctattctttccaattcagtttgttctttggtatttagtcccgtttcgttctttttctgatttaatgcatcaattcgtaccatatacccaagatacttatcaaattccttatcattcaaatcaaaaaaatttctcttttccattaacttttcagcagctgcttctcgttcagaatgttcttcactttttactctagtaaagttgttttcctgatttaattttcttacttgttttttaactcgacttaattcatctttttcttctgcagttaaaaattctttttcttctaatgcttcttttctggctatatatccaacgtaacgtccaaaagcttttcgtgaactcggcacagaaaattttgaagttaaaattatagctggtcgtcccaaaaattacctcctacaaataaaaattctatgaagcaagttgattaattattttgctctttcaattttaaaagccgtagaatcgcaatctcagcatcaaaacttactcaagttgtccgccattttcctccattctattattaattctttcttttacttttctctttgcagatttataaacttctgcatcaattccatttccgacaatttgcattccttgagtcatcaaaaactcacttaccatttctgttagaattgcaacttgttctttggtaaatcgctgttgttttctaatatcacttaaatcttttgtccacttagaatttttttcattttcttctgctaacttcataagatgatgaattacttcagcattattttttaaatcgtgttcctctttataatcttgaatccaatctaaatctgtatcagaaattgtcgctctaaaagttgtcttaatcattttttctagtcctcttaatcagcgtaagtttcttgtctttttttcaaagcattatcaatcttttgattaattttttgtaactcttccagttctttttctttttgaacacctaacatggcattgaagaataagaacttataaagttgaccattattatcaaagcaatgttcttttctaatctgcctaatttctttccattgcttatcgttgagtcgaaattgcaaaaagtgctgtcgtcccatttcttgccctctttctaaatttaatcatcttcttttgccgtgtcttctgacaaactatctaacaaatttaatgctcgttcggtgtcattaacatctccactaatgaaatactttgcaagaacattcagccctaataaattttcctgcagaagtttattctgcttctgaatcaataaactagtttgcgaatcttcattttgattttgaaaattaattggaatttgttcaatttgttctctcaaaaattgatttctggaaattttcttacttgaattttgatttaattgattaacaatccgatcaattctagccaagttttgttcgctgattccacggattaaaacttttaccataatttttctttcctctgatttctagtttctagttttccttctagtttctactctgaaatttgactaaaatctgcttcttttagttatctctagtaaagagcataagggaaatctgaccccacgccttttatcaaggtgtgctgggcttggttgtaccaagcgatttcgcatttttagaagtgatatcacttctgattaatttgacgtctatatacttctaaattgttcgtcttttacctgacattacgtcttgatatttttgtaatatccgaacaggacgtattcttacgtagctcattacgtccaagacgtaacattttttagctaaattttgcacctaattatcaaaatcaccgtccttaatgtctctgattgtgtcttcatatttagaaattgcttgctgactttgtgtgatagctgctttgttttctgaaatatcattttccaaactactaatttgtgtttggtaattttctttttgactatcaccaactttttctaactttgcctttgcagaatctaaattattttgagaattttgaatcgtagcttgagcatccttaattgtattttgttcttgactaatcttctttttattccaattaatcagatattgacgataatcaaggatatagttttgatagctcttagttactttgcttgaagtcagatcaaccttattctctttaatgaagaactcaatataattattttcagagaaatcttgcatgttaactcgcttattaactttttgtggtagaatatcaatctttaaatctccaaagccatttttgattccgctaacctcaattactaaaaagtgattattgattttctgtgatttgatcgcaagctcttctccatcttctccgccacgtgacatgtttactactcttatagcatactttaagttgcttaagtctgaatcgtcactagtagatgttacgtctgtagagtccccaagataatactctagcaacatcttttcgctttgcttattgtaaatagaatttgctaggtaaaatgatgaattgcctgtcactacattaacagtttgctcagtgtcaattgattttcctgtccaatagggactagcaacgattgcaataaaaattgcagccaccactccaatgaatgataaataaattttgcgatacttatgtttttggtgtcgcttcaattcatttttgtttttgctttgaatcattttttgcctttctaattgtcatccgaatgtacacgatagtttttgctatcatttaattcctgttttaattcagtaatctgctcctgttgatctcgaatttgtctttgactttctgaatctggattatcacgattaaagtaaactgttgccattagttgtgctgctgataacaaaaacaaaactaaggcaactaatttcaaacgatgatttgatttttttagtttagttttttctgattgatatacaattcgactagacatttttaatcacctcttatgacctgatctatcttttctatgttagttcccgtatatttttctacttgttttccatactttaaatggataaaagttggtaccttagttaacttatactccgtaatatagtgtcggttttgtggttgattagtatttacaaactgtatattctttctaaataaatcttttttcattacagcgtatgaaaaaatagaacgacagcttttgcagtcatctcgataaaataaaactgttgagtcatcattagttttgattttaacgatgtttttttgatttagttcatgattaacatgttgattaaaaccaataactcctatgaacaacaaaaaaatcattgcacaactaactgcaatgatttttaccttagtttcttttttcggttgcatcttaatctgcctcacgatcaatttgatagcgaccaaagtatttaattgaagtaatttggttagtctctgtgtcatacatcagctgataggcatcagttggtgtacccagagttctatcgtctttcgtcatttcaaaatacaccttggcatacacgggaacttgattattctctaaaactcctgctttcaaatctagctcatcaatctgacctgtcatatctacaccgctatattgaagttccaattgcctatcatttttaaaaatagaatttgtttttaaaactttttcgcttactaaccgtgtatcttttaccttatctggtatttttaatttttcatcaccactatcatacgtataaagcattttaagcaacttacttacctgtttcttggcttttgtctgtgctacatcctgctcagctagtttctctttgctgcctccttccttcatagcaatatgcttttgcgaatttccaattttagcatctacattttttaactcatcttgctttttagccaactcagttcttgcctgatcaacatgatagtcgatagctttttgcttgttagtctcataattgattacgcctaattcgagcatgattccgaggattgctccacctaaaagatattttttattcatcttagttcctctctatgttgatttctttaaagctatttattctttgggtcttaagattataatcaaagtcccaaccataagtaacttcttttttattggcactttcgactagggttactactgtaatcttagtatgacttacatctgttaagtcaccaaagtaaaccgttgtactcttgtttcttaaataaccataagaatctccattatttttgatgaagtttttgccctctttacctggaaaaatttttgtccaagcactaaattcttctttttgtttagctgacgaaaattttcttttagtatagatagctggtatcacttttagaaacttgtcacgtgcctcttcttctgcactcaccacatcaaacttttgtttatatgcagaattctttgtttgactattttgctcttgaactatttgcttctcaacagttttaatttctgccctaatatcattcagttcatcatttttaggaactctggcaattgcaaacattcccagaacagcgaataatactccagctgtcatcatccatactttcagattggactctcgctcctttttctgctgcttcatctttatccttctttcttggcattaataccaggtatgtttcatccagaatttttgtgcattacgccatgaaccatatctgccttttacatatttatttgctacccttgtttgattcttatgactgtaatcaccattaagatattctctctttaattgataacgtccataaacacttgggttagctgggttaactgcgtcccatctacctccagattctctctgaacaatccagtcacgtgcttcagattcagtttttgataagccatcatcttcttcagattctgcatcattgttcaaaccatctttaattaatttaattgggtctttccaagtaccatcatctttgtacgcagagagctctgcggtagcaaaatctttttcagttgcaccaatgtgaacgtgagtaataccatgtgcattacttgctaagtgacctattttatctcctactgaaactttgtcgcctacctctaccttgacgtatttcaaatctgcttcatcaaagccgaattcctgataaatgacattccaaccgtcggagccttctacccaaacgtacattcctagaccatcttgagtatgtccttgaaatgcaattttcttaacggttccaccatgaattgccaaaatatcttgtccaccatatggaacagtaccaaagtcaacaccatcatgaaagccacctgttcttgtagatgacttaccaaataattgctcacctgagattgtattacctggtccttttttaggaattgacttgaatggccacccccatttgccgcttattggcttacaatcttcctcagctgaattatctgagccactagacccatcacctttagctagtgatttattgcctttcaaggcatcatattttttagcttgagcttccatacctgcttggtaatcactttcagctgcggtatagtatcctgcttttttcattgcatgagcatattgagcaactgtagcatcttttcctaatccagcttttttaaaaccattctgaaccgtcacagcccactcggtcgcaaaatcacttaagttcttgtagtgaacgtaattaccaccttcactaccacggctttcacctttggtaccgatagtgcttccttctgaataagtcataccaccaaagttatgatcatgtttagcaactgaactatcaccattacctgtttcctgtcccatttgagcaaaaagtaatctagcactaatcccagttttctcatgcacagcatccgctatatgcatcatagcggtctgtccatacttaggtgattcaatgacactaattcgtccttctactactcctccttgttctcctcctgtatcacattcatcatctgtagcagctcccattgctgcaattaaaattacaataaaatatataactgataaaacagctaaaattcctaataaaaaagcggctaatccagcccatctttttgtctgtcttaaccgcttaatacctgttatcattattgaccacctgcaaaaatttcaagttgtcgttcagatggtttcatcttgacttgatatctttctcttcctcccatcgtgacaattgcttgtcctgtttgcaagtcaggaatgttactgtaatctgaactatttaatgcttcgcctaatagacttttgattttcttaagttgagatggatccatactcattagccatttgtattggcaaagttcaaaaaccacttttaaacttgatagttgagcagattctactgaatcaggaaccatttcttcgggtgattgtgtcgcaaatataatacctgcattaaactttctcatttctcgttcgaagtttttaacataatcaaccgcaaaaatattttcataatttatgatgttatgacattcatccaggaacacatcaaaatactgtacatcttgacgtgtgattttccctgcctttaacagagcattctgttttctaccatttatcaatgcatgactccaaattaaacttagagccatatacaattgtgcctgataaacattttgattcattgttgaaatagcagaagaatcaaatagtagaagcttagtatctgtcaaatctctcattgtagaataaccatcaaataattgaccgtaattctcaatcattgattccaatgctaccttgattttttcataagttcttattctttcagcagtaaattgatgttgttgatagtacattggcgtagccaatttttttagccaatttaaaaactgactaaaagtcgggtatttttcactatctaaattagtaatttttatatttcctttattttgttgaaaatttctaggtaataatcccatgtctacataaaatccacgtaacaatgaatcaaattcttgcatttcaatatttacaaaggatcccttattaatcatttggaatagaatatctaccttagaaatatgttggtaaaaacttgctagctcatcaaccttacctgtattttcatctacagtagttgccattacttcaagtggattaatcataccttctgatccatccaagctaaccacggttccaccataatgcttaattaaaggaatatattccttagtcttatcaattccacgaaagtacatatttctagcaattgtaccttcaaccaacatcttcattaaagttgatttaccagcacccatcttacccaagatcatcatattaaacgatcttctgatattagttgatctaaattgatcaaaataaaaggctcccccagttgaagtacgacctaaccagactcctctagggtcctttaagctttgagctgaaaatgggtcaccagctccaaccgttaaggctggaattggttgttctggcaatgctgctaaatccttttcttgctctgtgattggtaatgccattgatttaaactgtttatcttgcataaacatataaacagcaacgttataaccctcgcctcgaagcttgccacgaagattagaaactgattgatctaatgcttcaatcgttggagcatatacaaagattctggttagcattaatttgggaatttcgccaccttgacttaattccaatgcatatttttccaatgattgcatatctttttgtgcatttaaagcatcagtggcttttctagcattaacttgccggtcagctaattcttcaattgatctattcaattgccgcttaatttcatagcccgaatcagttttaacgtcaattgtagttaatgttgaatcgtttaatgacacttgagtaagccagagcaaaagcggatcattaggataatggattacagataaacaagcagcatatccatcacttgcaattgcataattatctgcaaaagtaataccgccctgcggttgtacttctgctagaaacttagtattgtaaccattttttagtaattctctttgctttttcaagctggtaacttgtcttggatttagctttacagttacctttttcttcttgtgtctctttgttttcaataaactagaaattctcattttttctcccttacttactattcaagttgttttctctaaagagtactttaaccgtttcttcatagtccaatggtctcaagcccattaacccttgatcagcaaactgagctgttctggtattaaccctaatatcatgtaaatcctctccaaaaatcatgatataaaattgcacgtcagaatagtcttctgtatttcttgatagcattactgcttgtaacaacatctcattaactaatcttagtcgcatcttttcatatctcgttcttggcgaacgaataccattttttaagtgacgaaaatactgctgctgttcactagtatcaattcttgtagacataactacaattttatagtcattactataaactcgattaaatgcagtaaatgagtctagaaatttacttctagtttcatcatcaagcgagtacaagtctgtcgaatgtacacgcaaatagcgtgcttgggtgccatctactaaatcaagtatcccgtcttttgagcagttactatagcccaagtattcaactattgattgatctcttgcatcttgtcttgatcctttatctaagccaaaagctctaaacaagctaggagctttgctcctactgtttctactttttctttttgttcgcattattttctccttctaaaaataatggataatatctgctttggtcttgtcgcataatgcttaacaaaacacgataatttctaatctttggcgctagaggggttcgcattactagcagaattcctactacaactccaaaacctgtcattactaattgccaagtcggttgtaaattaaatagaaaagaaatttgttgtcctgccatacccccaatgaaaagagcaaaaacatcaaacatatctaggaaaaagatttggatagatacattagttgacttaggaatcattattttttgatatttatccatgcactaatcctttcttctgctatctccatgacctaatttgccaacgttggtagaacttggtgatttagtctcagtagagttttcaacttgctgattgattgtggtcttatcatgcttaatttcagtcaccgtgttggtattgccttgagtttcaacggttctattagtgtttgaaggtacgctgctcttcatagcatccttcacactactcattccttgattgcctacatcatgagtagatacttcagttctgccagcctttctttcaatatctacatggttggtaccagcagtttcagttactttactatgactgtcttgtcccttaaagtctgaaacattgcttaagtgtctaccgccttcaccaactggttttggcggtgtggtttgttgatttgaacggtgttgacttgctaacttactagtggatttttgagtatctctcaagcttggtaattcatcgaccgcattactacttgttggtgagcttgaagagctatttgcttcaccacgctttgaacctgaaccagtaactgaagcactgttagttctaggatcatttgctgtttcttttttaccagtctttgaaccattcgttgcttcaccaactgtggtatttggaatttttgcatcattaccagttgtcttagctccacctgttgacttaatagagccgtcagttgaactttccttagcagcatttgatttaggcttgctatcatcggtcttaatgccttggttttgaatattatcaggtttaactgatgtattcttaccttggtcatttacatttttagctgaatcaacattgcttgttgccactgtttctttcttgccatcatagtttggatttcctacaaatgaagtatcacgtccaatacctgttggttctgcactgccaccattcttttcagctctgttttgcatgtatggattatgatgtaaagtgttgtactgattatcagttaaaccaccatttctcatcattctagcggcttcatcttgtacagtttcagatacagcaccagaatttactgccctgttccaatcaactgcactgccaccattctgcttaaagtcgttatgagctgaacgaaaggctcttcttgcataactgccagcttgttttgcttcactattgcttgctccattttctttagcaatagccttagtagagctaccagcttgccaagcttgagcttcaccaatcgctgcccctgctaacttaccagaacctctggcaactccaacagcgccttcagctaaatttttacctttaccagcaatatattcagttgctgcaattcctccagcaactttactccagccttgcttaagtccagtatccaaaccaaagaatttttgaaccttgcttgaaccttcccaaagtgcccaagttaaagcaatcattccaactgcatatagataaggattatcatgaatctttcctgcatctgatgaactcatccacacagctacaattctatagaacgctaattcaaagccttggaatgcaattaacaacgctgaactaaaaatatcttgtaccgcagctttagtacgctttccagtttccaaatcagtggagaaaataatgattgataatacttgcataattgccaattccaagaatgctcttactgaaacaaagcaaactagtaagaaggcaactgtcattgaaaataaggcaactacaactgggaagaattgtactgaatatcgttcatacccaccgttaaaaattttgaaaaaggcagtattgctttgacttactttggttgcataatatcctgaatatgcttttccctttacatttgatttcgtaccaacgcctgtaggagctaatttataacgcaaattgtcagggtcccatgctggtttttccttagacttatttgctttattacttaatttctcagctaaatcagctgaaatagtagttgataaatcgcctgatgttgcagtatcaaaatcagacttgttcatagcaaatgaaccatagtgaacatctttttgtctctggtctttaatttcaccatttttatctttagaaacaccttcccatttggtattagtatccccattattgattttgaagccactaaaattattagctatgattgctaataggtcattagaattggcttgtactacctgatatggcaagcttgacgtccctttatcattatcagcctgtacaaagcctttatatacacctgtagactgatcaaccacccaatttgtaattggctgaatatttccgattaagaacgctgaaattgctaattgccaaacgacattttttaattgaggagctttacttgaggtaccaattttaattccgacccaagttaaggttaaaatcatcaaccctgcagcaattcccattaccccattaattaaattagtgtttaaacctgtggattttaagattcctgagaaatccaaactatctgttgctagttcacttgcccaattggcaaatccataaaagatcttaactataccccattttgtctgattcaaaatacgtcccaaaaaatcatcataatgtaaataaggtgccgcattttgtagagcttcagttactttttgtaatttggctggatcataatcacctgaattggttgatttttgccaccaatctaccaaactactaaaaatatcaagatactcaggattaatgaaactagttaaatagaataaccaatttgtcattaatttttcctttctttaaacaaaaagataagtagtcattatcgctacttatcttgataatattcattaaagctttggctaaattcctgtgttaactcattcttttccttgttcttatcttctaattttttatctttatagatgatattaacaaaagctattgaacttggtttttgtccttcaggcacatcttttaattttgtagcctcgttcaatattgcttgttttgttccatcactaatatcaccatcatgttccgttaaccagttcgtgataaatggtggaatctgattttcttcttcctttaaagacttcttcatttcttgttcttccttagcatctttagcagctgcttgaacatttgcgtcactttgacgatattggttatatgcctgcaaagccaaattttcttcttctacaaatacatttccatcttcatcttgtttggtaacttgttcagtccaagttaaccatttgctccaatcgatttctaatgcttttaaattaatattggcatgtgcatcaatcttttcaactaaatctggattagttttaggattaaagtcatcagttaagaatgtatgtgcaaacggcattaatgtttttcctgtgttaaaaataggatgtgaaactaccgcccagccccatttattcattcttgttaaaggtctcaaaactagtctttcaccgccagctaaatgttctaatcgttctggtagtatcaacggcactttatctacgctaacactaacatttttggctaaaccattttgatctttagaaatattgcttgtctcaatcgttttattgccacaagcttctgaaaattctttgttagtagctgaatcagtagacataatcaaacatttattctgacaattttctttaataacttgtccgtcttctttgccatacttactgtagagctgggcataagactggataactaaagtaaatagaatattacgacctgctgaaactgtcataatccgatccatattctgcagcggaatcatactaccaaactcatcaaaaatacattgtactcgtctaattgtacttccaccttgaaccagccgacactgacgtgataattctgtatataattgattaacaaaaattgtagctagcaagttgtttgaagcatctgaatctggaattttcataaagactgcaattggcttatcactataatgcatcttaaagttttccatcttaatttcaggttttcctacctgacttacttcaacctttttaactttaggattaatctttaacttaaaagtattcttcaaacgcttatgtcctgcaatagcttcaatttcaacaaagcttcctgtttttagattgacatcaaagttgttttcaacaaatcctttttgactaacacgaatctcattcgttttcagttttttattatgattatctctaaaattgattttaattaactcaccatatagtcgttgatcaagcaactgaaactccaaatattttggaaaaccaattgatttcatttctagtgtgttcatactggtcatgcgtgagtttttcggtaaagtgaaaatatctagtttctgtacaacagttgaaaaaattgagcctcttgccttatcatctgagaaatttgtggaaccgaattcttttttagcaatagatccctgttccaaatgcttaaagtattcacttaaaacgttgtgttgagtatatggatctgatggattagtataatctatctgtcctaactgattaactaaatcagcgatatttacaaaagtaatatattctggatgggcttttttatctctaaagtttttaggattcatgcaatactcaatcaaagcaataatcataccaaattaagatactataatcataggtcatcatagacagtaagcacgcattttttatttgttgaatcatcataaatcaaaaatagtaataagcttttttccgtaaattttccgcaaattacgtaaaaacagaaatgggaagaaccaactcggttcctccctttttctgtattcgcaatgaatagtcgtgcagtaatataaatatattataccacaagaaaaaaagccccacgaaattaaccgtggagcaaacatcaatataaatcaaaaggttcaaaatttgatgttatctcagaagagatgttaaaaattatatcatgagtaaaataaaaaagccaccctgggatttctcccaaggtggctttcttgatagatttagaggagtatttcacccctcttcttttatatttcaataggcaatttgattataacacttttctaggatcttttttaccagtagcatgttccataccctcagtggtaacaacccattgctttccaaacttacgcactgttccttctggaaacttttgaggtgactgactaatggtctttctaacatagctctctgatacgccccagattcttgctgcttcttttgcttccataatatctggactatttaagttaatcactagaatgcacttcctatcattttaattagtaatcctaatagaatagcaactacactccaagctaaataacgatgcattttttgtttgtgtgtcatggtataattagatatgtcaaagagaggagcctctcggattccctctttaaagcttacttgtgtttgacaagtgttagaactattcgccctagttgtttgataagttcgtaggctggatagctccaagctccgatcatcgcatacttagcgatcttttcggaagtctcatcacgagtgggctttttctttttgccttttttctttgacatatctttacctcctttcacttattataatatcacgatatcgggataaatgcaataaaaaaataaaattaactaaaatatatttattttgaacataaaaaaagctcttgtgacagcagatcagcaagagccaagcaccgactagacggctagacacatgcccaaagtaaccagctttggggctttaaacgaaagtgtatcctttcatgtccataacagcttttatggctactactttttcaagtattttagccactgtaattgcttcatggattattaaaaagttcatgaagtaaaaccaggagagcaagcggataataccactactctttttattataccataacacaaaaaagagccgctccaggaaaaatctcccagagcggctcttgcggcatttggagtgttcttcacactcctttttatatttcaatcattattactatagcacgatgtaggcacgattgcctgtgacgtagacggtcttgccattgtgcttttctttgatacgtaggaatctgccgacacgcccttgaatctcaacttttgagttaagttccaagccgtagactttcccagcgtctgcctttggtgcatctaaggcgtgagtatgtggcatcacgatcttggcaacgccatgtttggcatcgttgtatgcgatcgggttagtcttgacatagacggcacgaccatcgaagtattggttcttgccaaccttgacagcgccgttttcaaagcctagcacctgccagacagaaccacaaggttttagcttgtcactttcacgcttgtctagctttgagctggtataaacatatgcaccttttgagttgcttactacggcaacagcgccaatattccacttgactacgggatgctgagagggcgattctacggtcttgtttaccttttttggtgattgatttacccgaactgatctttaaatcgactagggtaatattgccatcaacgccaagaccacggtagttatcagtaaactgccagattgctacgccgtccatagatgggaaatagttaaaatcagctgaatcttgacgacccatgaccttatatgaggctacccagagacaagttccgaatgatttaacaattcggctggtgctcaaatgatttcgtaaattgaaagcacctgaatagacaagtggcttgtatcctgcttctttgattacctgcattgcggcaagaacagcatcggtgttggcactagcaccgccattgactgaattgccagaaccttcttcccagtcgtcagcgatgtagctaccagctgggactccgtaagccttagccttttcaacggcatacttagcttctgcccgtgctcgtgtgaccgagccggaatggttggcatagaaatagcccatggttagcaagccatgagcctttgcagatttaatttgcgcttttgctttcgggttgatgtatccagtaccttgcgtaagctttacgatagcaaatttcgcacccgtgtagctaacgttttctttctggaagctggctacgtccacaccatagcttttctttgatacgattgagcttgacatctttttcaccgcctttcgtttggttttcaaacgatttgtcaaacgattcaaaaacgtactcgttatacgtcttagttcttgtcatcattgtcgtcacctgatacaaagccaattggttgggcgttggtatcttgtgtatcctcttgtttggcttggtccgctgtcatttggtcataagcatgttggacagcacccttggcgactgtttcggtcactggcttgttttcttgcttggcttgatcaagtaaggcttgtacagccttgaccttcttttcggcaccagaaatatccagcgttgcggcttcgcttacgacaaacttagcaatctcatcaatggtcattacttgctttggaagtggtttagccgactttttggcaaagtattcgatactagtagagataccgatacagatagccacgatagccaaaacaactatttgtgtgtaagcagttaattcagtgagattcattattgggtcaccttcttagtagtaagtacgccgctagtgatgtcgcccgtcttagcaggggtgtagcctactggcttatcctctaccgctggcttggttgcgtctgggtccttgaccatggtttcgtcttggatacctgacaaatagcgcacccacttggtaactgcacctttgatgtcttgtggcacatcgtccaaggttaaaacaccatcttgcacaagagtggtgtagtctaaaattctagtgtttggtttcattttcggataactcctttcgcaatttttcgttttccctgcgtaattccttattttctttaactacagcctcatagtcgtctactaaaaagctatggctgtcttgtctcgtatttctcttatcacttagatatgaagtaaacaaccccaacaggaatggagctagtacactaagtacgtctttaagaccttgcaagtgtatcagctcctttctcagtcctgtgggtcatactcataagcaatctgcataaggttaatgattgcgtagatctcaaaaacaatagcagggtggaatctgaaatagccggctccaacgatgtgaaagctttccgcaaccagcagaactgtcaagaatgctactgacacgcctagaccaactttgatgattaactgtacccgaatatcaaaaacaccgcacaaaatcaaaattagtcctgccatcaagccgatactatcgacccagacgttattccacgcaggtgctagacttggtgggtaaaaaaagtaggttcgatctatcagaaagcagaccgccaatgccgagattaacagccctgttttgatgaaattccagcgactaagcttgtggtgcaggttgagcttgcggtgcaacatagtcttcacctgtgactttcttgtaacctgctgcgtccaataagccttgttgaactaagccttgaaagtaaggcttttggaaaagccccatttgatagtcaagtacccacatttgtaaaaataaagcgtttaaatcagtcataattagttacctccgttttcttgcttgttagtgttttctgctggcttagtgtcactggttggtgtagcagtcttagcttgatctgcttgcatgccaaccagaatttgttgcattgaagccataaccttgttggcttgttcttgcccttctgcgaccttttgcaagccttgggtcaatgctaaggattgttgtgtttggacttgttggctttgttgcatggccttcattgcttggtcaaacttatcgttggcttggtcaagtgcggcgttcttcttatcaagttctgcgctcttcttatccaattcttcaatcttttgtgtagcttcttgcaagattgcggcttgaccgtccttggagttttctacccagccattaaccttcaagtcccagacaggatcttttaagctgtcgtctggcttttcaatgtgccagtgccatggaagttctggcaactcataaggcaacgtaattactacgtgatgcatttctgcgttgacagagtcaggatcactaaagtaataggtaaaccccttgttttcttgtgtagcgttttcttctgcgcccgctactggtgcaacttgtgtgttttcatcagccattttattggctcctttctattaaaaaagcccacgggaactccccgtgagcaaggctaattttttgcataaaaaaagcactcaatgagtactaatactataactgttcccttgataaatacttagtcatgatatccgatgctttgataagcggtgtgtatatcccatcaccagtattaggattatttatccaatgatcaacgtcaacaatataatatggaatattatgttgatctaccacaacgcctgtgatttcacccgtagaagctaagccgcctatttcatccggtttattccattgaatcgaattactattgatagaatagctataataagcattaatgactccctctctagaccatcctattttatatttactgcaagttatcgctctgccaattaattctgtatttacataaccgacaataatttttgttgtagggtagtagtcttctttattaaacttcatgtgatctagcatacagccaccgcctttctggtggcggctctaagtacttggtataggtggattaacgggctaattacccccccctaagatttccgtacagtccgattttcgaacccatacaggaccatagacggtgctactatctcctttacagataattggcaaatctatacttctcccgactaaataagcggtatttgaagaggcacatacatccagctccaaatctgcgttcagtaaagagtaagtagtatttggaaaatccgtaaaaacggtgcttgttgaagttcctttgggaattttgacctttttagggaacataagataatcatttttattgaagatcatcttttcgatcatagaaccaccacctttctagtgatagctctaaatgcctgacataagcggattaggggggtttaccccaccatttcaagttgcgagcttgtgataccagcactctgtaataaaaaccataagtctcatttcccgcgcctaagctataagtgtcttgcgtttcaaatttgtttgtgataaatgcatttattcttctgtcatacccaacgatttgaaaattaatgctttgaacagatttgccagggttaacagctccgttatcatcaattaaaactgacccagatggcaaatatccagatgtaggtagaaaactagcattaaagttgccgttttcgtccgtcaggcttcgccattttttacgatcaaatagcatatgatctagcatgtttccgctcctttcttaaatagagtgaaagcatactcaaccattgacgcaatagtatgtagaaggcttttacccccccatattacatttctaacatttgttttttcaactacgcccgtgtaatagtaatgcgaataaactgcattattaggatgcttgttttcatcactatcagcgtaaatttcaagttgtccatcaaagaaataaacgtcttgacctgccccaacacaggtaacctcagcatcatttaatactcgccagccattacccgtattcgggtttttgatcggtgtttctgccatgacagtaaatcttgatggacaagcataatagtttttattattagctgtaatagcggacatatcgtttgaaatttcaaaccacttttttacattaaaaattagatgatctaacatgctttcacctctttctatctatctatttttcaatcatcgcaatatcgtttggattgttgttttcccattgctgggcttgtgcctcttggttggctgggaaccgcttgccttgcaggtagttttgtttgatgtagttgatttgattaatcaagtcgttaacttggttttgtaatgtggtaatcgtattaagtaagctattaatatccgacttccaagcgatgtcttcactccaaactggtccgttgccattaccgccagtgattcgagcttgattattatgataaccaacgcttagaacgcctttcgtatctgcgccaccaaagccaacaccagcagcaaaatcattcaataatggacctgatccacctgcgtcaattctaatagacgttagtacgctattaggattaccaaccccaaaaatatcttgccaactatttgagttttgaatctctctaaacagtggtgtagctatgttgtgtttggtgttgatctgattttgtaaattagagatgtcgatcatttttgccatctgtcgccagggttgccagttattatcaaccttcattcgataaaatggagagtcatcattatcagggtagtaagtttgaacaattctatgatcagcgccattagaaattatcagcgtaccccagatgcccccacaaggggaatttttccctttttcagggtttgtcacatagtaaggacctgaatcggtcaaactatcaaagtctggcgaatttgcggttcttgcaccttttaagttgttaacttgactctgcaaattgtccgcccttgatgtagcggcattttttgcatcttgtacttgggcgtttacgtttgattgatctgccttggtgccaatctgactaagcaaaacgttcactttattagcagtccagtcatctttgtaaagatcaatagtgtaagtgccatcagtattcttggtggctttccaggtatgatcttgcgtttgtccttggccgtctaagtactgcttgcggaacctgatctttgaaaaatcaattcccgcaatttgggcgtctaccgtagccttgtcagccttggtatcaacggtttggctcaacttattaagactgtcttgacttgccttagtgttggctaaatcggtaacagtcttaatctttgcatcaacgtcagtcgtatcgtccttagcactaagcaacttatcgacatcagtcttgctataagtcgttgcttggtccgctttggttgctaaactgtcattgactgccttaaaggatttgtcaacgtctgccttgttagccttgtcggcaatcaacgctgtcacttggtcggcgctgactttgccattggtgtcggtcgatagggctaaaagcttttcgtccagttgtgccttgctgtaactgtaatccgtaccaaccttagtggctaccacatcactaacagccttgatcttggtatcaacatcagcgttcttagcgtacggggtaaagtcgatttttgcaatctcggcatctaccgtggctttgtctgccttggtattaattgcatcattcagggttttaacctgcttgtcgatatctgtcgtgttggctttggttgctaactgacttttaacggcttcactgtcggcttttttagccacttcagcgttagtttgatcaaggttagattgactagccttagtatcaattaaagccgttagaacctgcttagtttcgttgattgcaccgtttaaagttgccggtgtaaccgatgcccccgggtcaaccactgccgtgacattggttgcgtcgccaatcgcaattgctactttaagatcaagagcgtcagtcgctacgccatccggtcgggtagctgctaggtaagcccctgcattagcaaccgcaacaatgattagcttttcgtcctcgcctttcttagcaaaaaagccaactgccgtgtaaggcaagtcagctgttaagccgtcattctgaaaagtggcttcaagcactaccgttgtgtctttgccgttgctttgtttgtcgctaacaccaatcggtacctgttttaaggggctgccaattgaggtcagggcttgcacttggtcagcggttaagtgactgatatcttgaccatatagcaccgccttagtgtaagtaacgtcaccaccagcggtcatcattgttcgcccttgttctgtgatataggctggatccctgatttggctcattcagtcggcctcctttctacttttcaatcattgctagatagtttggatggtcattttcccattgttgggcttgtgcttcttgaccagctgggaatctcttgccgattacagcgttctggttcagccatgcttgtccttcttctagtttcttaactcggttcaccaagtcattgatttggttattggcaccggtcagctggttgttcaagctctcaatttgtgtgtccttagcaccatttttgcggttaaggtcgttaattgtattttgttgggcttgaaacttttgatcaacttcactctttaaataaaagaccgtacccaggttgacgttacccgtgttgtcgggtgccacgccttgaacagtattaatccctgcacctttaccagcaccagcgaccatttgatcaatttcttcttttgtgtaggtgtttaggttaaaggtatggttgccatccgccttgaccggttctttacctcgtaaggtgatagtcgtgttcttttcgttgtcttcgatcttgccgttaaaatcagccgttactttagtttgccatgcattaagctcggcacgagtaacgtatcccacttcattaacagtcatatcgatattagcggcttctgcgattgtcatagacaattgtgcagagataacatcagtagataaaccgtctgggctacctgccgctaaggtctcgtgatcgttagtagtaaaagtgatagcgattaaagcttcatcgccttgtaccttttgattctgttcattggttgagtcaactcttgcataccaaccaatacaactaaaattgatgtctgccggttgattcttgttgttaaagtcagcaattacatcaaagtgatcatctgtaactggcgttaaggttaattgcccttctttgagatcgtccggcaaactagtgatttgacgaattgcttcatcatctaaggcttgtccggaactattaacgggtttttgacttgataggatagcgcgtgtataaaccaatgtgcctacgccgttaccaaccgataagaagatatgtcgcccggcatcggtcaagatcgtttgcttcaatttctctttaaagcccgtattaggatcttctgccatttcttgctcctttctttgtattaaaaaactactcagtcgcaatcgattgagtagttgtagttaatgttttgttcccaatagttaagccagcgtgaatttctgctgtttgtggcttgctccacactgctgttgtcgcccataccgatgatttagccagttgaccaacaacaccaatgaattggcttctagtgctttcagctttccagccggtccaccatttggtatttgatgacaaagtattgtgatgcttgaactgtgtagctatcccaatatattgcttgtcgcttgtcctagccttccagccagtccaccacttaacgggcgatcgctcgattttgcgatgtttgatctgcgtacccatgccaacgtaaagcggcaactttgtggtagttacaaacacgatctcatcaatccagtagcccatcgcgagcaggttttgaatattctttatgatgaatttttgcatttgaagtgtttgcacattgtcccacggtatttcgataccaacatgtcgaagaccggttttatagaccttgaattgttcaggctttgcatttaaggcagtgcccagaattttaaccattgagggaattgttccctgtgccctagagattaaaatgtgtaaaaaaatgataaaacggaaagtttcatcatcatcactaattctataagctttgtaatcttgcccgattaaatcaagggttgtgccttttgctttgtcaatgctacgccactccgcaattttttcattttcatcactgattttttcaagcagtgaattgtaactgtctaacaattgataaaaaacggtatcttttttcttattccagtggtcggctacttccgcgatcagttggtctgttgtctcataagccaattaaatcaacctccacatctccagggtcacaatgagcaaattctgaacgaccaatagaaatattttggtccgctaacttatcttttgtgctaccgattgcaattgttgcatcatcaacgccgttgacatcataagtaacggaataaaggcgggtaaaattaactctttgacccatttcaagtgagttgatttcatcgcaaattgcttgcttaatgtcgtcaacccccgcatcactgttccagtcgtcattaattgatacatcgacctttacataaatgttatgttgttgagcgtggtcaaatttgacttcttttaattttcccgtagcgtccggagcttctttaacaattgaacccgctaaagtgataccagccgcgcatttatcaattaaggttttagcaatttcatcatcgttaccgcctaaaacataaatgtgaactgaacattcgggattaccgtattcatccgtcttatacttgtcgttgtcaacgaagccaacttgcttaacaccgtttaaattcattaacgccgatttaatacctggttctgtaggaccaggacgggcggcattttccataattaaacgttttctaaaggtttcatcgtcttcataatcttgcccaccgcctgcagatcgtggattggttacggaaataaagtcttcatctgggttggcaaacaaagtaattgtgttggctgatacattagtaaattcaccagtttcttcacattcaacatttccagttccttgaaaagccccgttgctttgttttgaagtgataacgtcttctgttaaatcaaataccaagccgtcttctgtttcgaacttttcgccagcttgaattaaatattcgccttcagtcgttattactacttccgcatgagatggagcgtcaactttacgggtcaaactgatattgcccgctaatcggtctaatgctgaatttacagcggttgaatagaatccagaatagtaaatttgttcctgttgctgaattaaatcataagacgcatcactcattaaacgggcaaaaattcctagataagcattacttgttagtgcaatatcatcccctaatctagttcggtaatcgtcttcaacaccgtctaagatttccgcaaaacttggggcaatataaccggtttcttttaaaccaaaatcagttgtcaacttgtaacccccccttctacttcaccaatatttgcggtggctctaaaattaatctgcatttttctttcaggtttcttgataaattcgatattatcaacggtttcaacttccggtacgtttgcttcaatagccgctcgcatatcattctccgccgcttgcttattgaagtttttacctaaaaagctgctataatccgcgcccatttcagggtctagccgttgcatttcgccatatcgaatttctagcgttgccttaattctttgcgctatttcgtcaagaccgctagtcatttctaaatcgtgagtaatcggatcaataactaggtcatgattatcactcataaataggtccctagccatcgtcgtcacccttataaacagaaacgataattgagtcgtttgcatcatgcatcctgccggtatttggcgtaaaggtgttcccagtgccgtcccagttatcaatgtcacggtccatagtaacggctatcactacagcgccaactctcatagacttctttttcggataatgttctaaaaaatgtgagttaacttctgggctactatcaacggcttttaaatccgacttaaacttatctaacaattcatcaagcctatagcaagattcggcaaccggaacatctaagtactgagccgatttagtgccatcgatccaattcgccagcggttgaatatctgcaatgtgttttttcttgtcgtaagttaaaactttagctaaaaaagcagattcaagacttctgctgaatcggtttttcaccttactaatgttttcataccatcgaattggaaccctatttttttgtttcatactgtcatctccttattttttagatttactttttttcttgcctttacttttagattttgttttatgaccagccttagcttttgtaaccgccgcaatagtgcattgagtttgtggactttcgccatcaaaactatgctgtccatttttaacgacaaattttccttttaagaacttagaattcatgataatgccggtattaacggtaacttctgggactaagggcgtaacaatttgccaagttgtcccgtttttatcatcatcgttttgcgatggaacttgaattaagtctttatcatcaatcacaaaccaagtatttttcttgctattaggattgacaattacgagcttgccacgttcataaaacatttccgattttgctaacttaacaaagtttttaattaaagttagcggcttgcctttagcggtaaaggattttttaattccttcatttttagctaaatcgattttagctattttgataccggcttgttccgctattccttcaattacttgcttataagtcgttccttttcggtaaactcggttagcaaaataagtcttattatcacggcttttaacccttttatttgtagtttttggtttaacccatacttttcgataagcccaatggtggactatatgtttctgcccttttttaggacctctcttgtaagtttcaacgaccgaggtactataacgctgattcttgtaatgacctttttcagtgattttaacggttttgtagtgattaacctttttattcttttttagctttagctttcgagcagctacattgctgtagtttgtgccttcagtaaaagttaaaactttactatcagttgtcccatcattgcttaatttacccgtattagagataaatccttcagctatttttttagggtctttaccccagttaaaatttatccagcagtgcatcccttttttataaaagtctttatgttgcttggttaaattgaaaatagttgttgtaaaagtagacgggacaggatcattagtaaacgggacttcaaacgtaaaaggataattatgttcgtaagtttcatcgttatatacgatttgcttgtgtcctttactatcaaccgccacaaattccatatgtggatctttagtaacgatcattagtaagacacttcctcatccgttaggtcgtcatcattttcgttagggtcataacctagcggtttaattgatgggtcttctgtttctgatccattcgggtcaacaacgtcaagatacaagcggacctcatatccaaatgttcccttgccttggtctgttgccttacccgtttcgtccatcgtgcgaatgtcaattcttggcaattcgggatcagggatatcaataccaactaattgaccaagcaaaagaggctcctgcgttagaagcctcttattgttatgccaaattgtaattgtgtagtaatccgcaacttcgttgtaatctactctcatatcataggtatcgcccacaagggttatttgaaagatataaggaatatttttaacatcaacatcaagataatttctcatctaaatcaccgcctacgcaacccgtattttattgccagggtagattaagttaggattcttaatgtggttgactcgtgccatccattgaacagaactgccgtatttcttagacaaagcccacaaggtatcgccagatttaatagtgatagcagtgtactttttatttcgattacctgcgacagatttagaagccttagacgactttctgtggtgcttactatcatttgaagtggtgatttttgcttgatagacaaattgaaaagtaagtgaaacttcaatgttatctcgaagattcttatagtcgttgttcatatttgcgattaagtaatgcttatagcagaagtcccctcgataggttaaccgaacatgcgaactattccattgactaagcatgtgccatttacggtatgaatcggctttatctttgccaacaatgatgcctgcaactgttgcgcctttactatttacacgagcatatgagctatatggtgcgccctcatcaaccggataagaagtaatgtttgaagaaacattttcactttcaccgtctgccggcgaaatataaataatttcacctttgccatccgaacggtaaatagcacatttaccttcattcttccagccggtgttgtgttccgcaatttccgccaatttgttacttaaatcgattctttgcgtaacaatacggtcgtacttgtctttcgcttttttataattgttttccgcttgctttttccttttgtttgcagcatcaacaagcttcaaacaattatcacgttttcggataagctttttctttttaatttgattcttttcaaaatgtgaatcgaagtcatagccctgcgcctttgaaaacatttttcggtaaacggcgctttcatgtttttgccgcttgtcccagtatttcatagagtcatgggctttttgttcagctgttctcttttttggcttagttgcttgaaccactaacatcaccttcatttctataagaaatcatcatcgtcacccgtatcatcgccaatatgatcaagaatgatatttaatttttgacgtacttgttgatctacctcagcgccaatcatttttgctaatttttgcaatttagcattgtcaccatcaacgtcaccgttaatattcacggttacttgaatgtcacctaaagccccgccagttcctcttactgggcgtactttcggcttagatgaagttagtggctttaatctttgccgcgtcttttcatttgagtagatgtgaaccggatctttgaattcagctaattctggcccatgttcgccaactagaaccttattgccaacgacaggatcgccgcctttagcatatccaagaactttgcggatctccatggcacctttgacgtgctgagcattgtagccgccacgttcccattcagacgaaaacttgtttgctaggctggcaacgctaccagttccttccaaaacggagcgaagaatagcactgtctgagccttcgcctttaacggcaaagcttaattgtgtgccggcgtttttccagcttgtaccgtgacgtctagcataagcgattaagttagacttacgaccgccaagccattgacctaaaccggaagcaccaccgctgctgttaactgcaccagggtttaaaccacctgactcaaaattccaattacccagaacagccgcaataccgttcttggttgctttaggatcaagcttctttaatccgccagctagggctttagccctttcggctaagtcgccgccgatactaaatgaaccaagtgagccaagatcatcgctaagattctttttaatccaactcaaggcggtactgcctagctctttctttgcaagagccattaagttcttatcagccgctgctgtcttcttagattgagcggcattatgcaagccacgaacacggtaatatccgtatcccatgcctttgtcatcagcaattgaggtaacgcgtgcatggggtggcgtttcgttgaacattgttccggtgtgtgggttcttaataattcccacgtgaccagcggcacctgttccatggccaaagataaccaagtcgcctggaattgttttagataatgacttacccaagtactcaacacctgaactgtgttgcattgccacggtggtacgtccaatatctacgccaaagtgacgtaaagcttgcattaccatacccgaacagtcagatagtgtcttgcttgccgcacccatttggtacttaacgccactgaatgttgattcagcatattttaaaaactgctcacgagtaccacccttgccagtggagtcaccaatcgcattgttgatgacaatccacatagcagtactccaaggattaccaaagtgagttgacgcattcttgccaagatcgaccgttcctttttgcagaactggtccgctttccttgatgttcttggtgaacatatctgcaaagctcttagcaggatcagcaagcgcatgtgatgcaatctttcttaattggctatgacttacgccactacctttggcaaagtgctgaatgccacgttttctagcgacttcttgcgtctgagtgccgttcaagacaccccagccacgaggaatcatcaaatgaacgttgtcaccatgagggaagtacaattcgttgcttggtgagacaagagcctcttgacgtggaccgctagtcgcatcattgacaactgaaagagtattttgcgtcaagcgaccgttagcgtcagacccttgtgcaaagtgaaccgtcttgatgacgctaccgttaccgccaaattgactcaataccttgtcgatgcctttaataccacggttaagttgatcaatggtgtcacccattgcgtccttagcgtatgagcgcatcttgcccatagccttgccaaaacctttgctagttgagttagcagtagaaataacaccatcgtgcatgttattcatctgcttatccacagatttacgcatgcctgtgtattccttagtagcattagctctgtttttgctgttgtacttagcagtttgactgttaatctttgaccagcttgaagcattgttcttgcttaaactcttcaaagacttagtagcgtcatcagtgatcttcttgtaatccttggatactgtcttggtggtttgaccaagcttagtgttaccagtggcataacctttgagagttaagccacgacctaaaccaccagccatgactttgcgagtgtctcttgcattaagaatgtgttcacctggacgcaccttagtgatggcaggaccattagcacctaaaagacgtgcgtttgatccggctctgtaggctaattcaggaccggcttcaccaactaaggctctatgagctgatccgattaagccaccagttgcatgagatttgatcttctcatacttgaaggctttaccagaaccaccagccgcacggtttaagtcattaccaaaacctttcaggttattagtgatacctttacggatatcgccagctttaccccagaaattgttccaagcatcttttattgtattgccgactttgccagcccaatctttgactgctttataggctttacctaattgacctggaattgaagaaacaaaagaaccaactgcctttttgcctttattccaaccgctttggatactgttgccaaccttgccagaccagttgcttacactcttgtgtgctctgtttaactgaccaggaatgccaccgacaaacttctttacgccagtgacacctttgttccaagtcttttgaatattgcgaccggtacgactatcccaatttgctacactcttggcacctttagctaagttacctggaatgcctttgacaaagttaacagtagctttcttgccacgttgccatgcccttgagatattcttgcctgtttgactagcccatttgccaacactcttcttggttttatctaagtttttaggtaaatctttgaagaacttgtggctagcctcgacagcacgattccaacctttatggatgttgcctggtaggtcttttacccacttaacggctcctttgaagccattttggatagtcttgccaacgctattagcccattttctgaatttagggttgttcttgtataaaagtgcaggaataccagcccacggagcaatagcagttaaggctaattgcttgccattctttttgacgaatgaaccagccttgccaagtgctctgcccatagacttaccaacttgaccaccccatctaccaatcttactgaatgtgtctttagtagaccagccaaggttttcaagcgaccagaaattctttggtggctttttgcgttgccagccatgtacaaagctgttaacagcactaccaccaattcgaccaaagagtttaccagcttgtgcgccaagtgcagcaccaataggaccaccgaaaatgccaccaatgatggcaccagcacctgtaccgacagcgccaccaatgtctactgatctcttagctgcattgtgtcgatctttgtaagcttggaagccttgatagccaacatctaatgcagttccgacaccaacagcaccgccaagcaatcgtctgccaactagtgctttacctgttagctcaccaggctggactctgccgagcttgaacatgccaccgaatgaattacctttcagtgcattgattaagccaccctggcgagatgatcctttgatgtattgacctgtaaccgggtctcgtggacgtacaccggtctctttgccaaacagtagtctacctataccagcgccaattcctttaccgttaccgataccgaaattagcttttaagaaaccactggctaacttggacgcacccaatgtgccaagaatacctgttatataagcagcagcagtcttaactggctttggcatacctcgcatagcttcaagtagcttgttagcatagccaagagccttgctgataccaggtgcgacttcctttgcaaagctcatacccatatcagtagcaagttgcttagttctagctaactggttctgcaatgaggacatgttctttcttgacagccttgaaatatagccagtacgtgcagcattttgagattctcggacattgtgttgcatgtcaccgtagtgattcatcaaaatctgagcatcattgaaacctgtttgaccaaataaagtttgcaggtcggatgatactcgattagatttcttaccacgagacgcacgattcagcatctcaaagatggttcctaactgtttcaagtgaccatttctggtgtacaagctattaggattaatacccaaatcatgcaaggcacctagcatcgcagtactatgtggcgctttgatcaatctagtgatgatctgacgcataccagtaccagcactcgaaccttcttcgccgtagttagataacgtacccaatgcacccagcatagtatcgatagtttgaccatttgaatgagcggcactacccatcatcttgaaggactcgccaaaaccactttcaccaccaacgtcaccggaagttaagtcagcaacgtaagcggctttgttcaaaacatctcttgtgtacttagacatacgtcttacactattaccagctctggacttatagccaaactgttccagcataggtgcagctgagttaacgattgagttgtaatcttcgttagtagcacgagcggcttgcaaaaagtacttgtgagcagctaagtcttgttgaccggaataaccacgtctgagcagttgctcagagcctctagccaattcgttttgatcaacaccataacgaagagacaaacgccggttttcagcctgaatttcacgagtatttcttctagctgctctcggagaatcaccaccggtttcctgcaagttcttgataacgttgtattcatcagccaacttggttgcttcgccattggccttcatgaatgcagcggcaactggaaccatcgcagtagcaatagatgaaccgacttgaaccaatgctgatccagcacctttcaagcggtcccagccactctttaacttatttgatgaaccggtagtcttatcaaagctttctctagctctgtcagatgatcctctagcacgatcaaaaccgctacccatatcaccaagtgcttttgatgattcatgagcacggttcattgactgctttaattggtcagttgattcagtagctttcttagccttatcagcaataccagacagatcactttgcgcacgattgagattgttattagtgccaacttgcttataactattagctaacctgtcaatctgtgttttagtttcacctgatgcacgattaagcttgtctaagccattagcggcagaatctggcatcttggtacgtgacaacacccgattaagttgttctgcattagctttaactttatcaatacgtctatcaactgaatcgaatactgaattatcaactctaacgccgatatcaataccaacatgtcgtcctgccatctatctcatcctttcttgtgcaaaataagaaagccttattaggctttaactgtcctcaccgccaaatgccaacgcaatgccttttgccataattcgtgcttgatctttagcggttaaatatgtctgatatttcaagtcttttttgactacttcccacatcactcttaattggtcgagcgttgcatgattgatccatgattcgggaacaccgtgcattaccaaacactgtggtaaccacgttgcaggatcagaagccaaatcactaatcttcttcggtgtagccttccccattaatgcttgattgaaaccaatctaaaatcttgttgtaagcatcgtcatagcctccacgcttgtcaaaccaatcgagagagtaaatctttggacgtacaatcaattccttaatagcaacgttcttcatgaagtaggtttgatcaatggcaccaagagcagttcttgcgtcatcacgtaagcttgaagcttttgctacacctggaaaaattacttcgatagtgtattcattcttcttgcccttattgatagttaagaaagtaggcttaccagtaagtgaagcaatttcactagacttttcttgcttatcaatcaaagccatcatgtcttgcaagttcttactttcagtagccatttggctagccttatcttcgtttgattggttgttatttacgttttggttttgaatttcttcgctcatagtttttctcctttaatttttaatttctgttttgtaagcgtgaaagccattctcgatactaacgaccgactaaggattcagtatcaaggttaagtgcgtgaatttgccatgcacgattaccggcgttttgtgctgcggtgttgtctggcatctttgagatgtagcagtgtgtggcggtttggtgaactgttgaagttctcaaatcgagtggaaattctgcacgtgtgttagccaattcagtcaacttggcgttgcttggtgaagtttcgttcaagttgacagtcaatgtggcaccggttttgttgttgattgaggcaacagcggtgccttgtgggtcttgtgcgacagtaacattgtcgttgtcgtaggcaacggaaatcatggtatctgtcgcaaaaccatacatcaattcaccgtcaaccattaaagtggtgtcattggcgttgtattttgccatcaagccggtttcggctgagttaaaacttgccatgtgttactcctcctttaagcttttgaattagtgaaagtatcagattgaacagtgccgtgtacgagaacggtgtggatagcacctgaacggtggtatctgaaactcaaaccaccgtagtgacgagctgataagtctttttgactttgagctgaacgtggagtggcggttactgagtaatcccccttgccagttgattgagtttcaccggtgtttgagtcgtatacttcttgttccaaaacaattccttgttcgtaggcttgttggaggacttggctacaaatggcggcgagtgcattaatgcctcgttggtcatatggaaccttgtcggtgttttgcaagtacttttggatcttgtcgcccatattggtttttacccaaagatcgccgtggagtgagtcgatgtaatcaccagacaatacccagccttctgatgtttcgccttgtccgcttacttcgatgtaagcaatagcgtgaacacggtcgatagctgacttttcttgaacagtgatttggtcagcagtaatgcccttaagctttctgaacttccaggtaactaagccaactgtcaaggtggcggttgcaccgatgagagctgcatccattggttctgataagtcgtgaatcaagccgatggtgtagttttgtgcatagaaggttacgtatgcggctggttgagtagcttgcaatactaagaagtgatccttgttagcttcgcagatgttagatgcaataattgcgtcatcacttggggtggtgtctgtgaattgtgacttatcaaagatcatgaaggcccagttgtaataccagaatgccttcaaagcgtcagcaagcttgccctttggataattcaatacggcaatacggtcagatgctgcttcttgcatgaagtagttgtctgacttgatgtaaattggatcagtcttgtcgtagtaagcgccaactgcgtctgctgttgcgtattcaacgtattgagcaccggtataaggatcagtcttgcggcttaatacgccgttcaatacgtcgttgggttccaatttgtcaggtacaccagttactggcgcaactggtgtgatctttggtacattgatggtcttgctgccatcatcagtagccttgccatcagttgtgccagtagtcttgcctgtatcgctcttagctggcgtatccttgccggtgccagtatcagcaagagcaggctttggtgctgtagaagatgagcctgcgtcaacttcatgcaaaataagaagattgccaagcccgataattgcaggtggcttgacaacagtcatttctacgtcaacgtccttaactctcgtaaaaggacgaacgtctgtaatggtttctgccatttgctattgctccttttcttttccattggcgctgataacttcactgtcaccagcgtcgctgagttgtactgtattgatttctgtttccggctgagcttggaagtggaggtcatccggtgagtaaacatgaccgccattggacactaaaaaagaacaatcaaagccgaacctatagtcgtaataggtaccaactctgactgttctgtcgcttgtgttcgtaaaattctgtgggtcaatatccgcttgctcaaagtagttacgataaacactgctttgaaatgcactgtaaaggtcgtttgccatattcatcgcttgaatggcgttgtcagcatggcaatcaatttgtaggtgtgagatgtactgtcgtcccatgcccaaccaatcgcctgttgtttcctgttccggcacaataaacgaataagtgacaaaaggatattgtggacggtcagaaactaaattctgatagagcagatcgcaatcaagacgctctttaaccagttgctgaatgatataagtcagcagaagattatctttgagttgaatttccatgttggtgtgcgtcatctcccttcaattcgtaaatgatcaggtttgaatagtcctgatagttagaagagttagtgacttcaaataaaccaccctgtgatgggacattgaccattgtgtgaacgtagtacttcccagatgacagccacattaggtctgcattggtttgagtaccgccggttaaatattgaatgagttgtgatgtcaactgattaaccggaataaccggctcatgtcgtttctctgctgttttttcatcgattaaggtagattgatcgtcagacattaaaaaaccacccacaagctcttttttgcctgtgtgtggtttgtctgatttccgaacttcgatatcaacgccgtaatcgtccaacatcgaagctacatccatgtaaaaactcatagtgtcctcctatttcgaaatgatcttataagtgattttgttaatgagtgccccaccttgaccgccagcatgtttaccgatcaatggattattgaaacctttgttatcgatagtcattggtgcgttgcctggcttatacagcctgcgcatctcatgctgaatgtcagcaacagcgacagcacctagcttgtcaagtaagccttttcctgtagcacgaccttcaaacactcgctggactccgacctgtgtcaatcgaatgtacttttgttcatattcaatcgaagtcttacgaagaaacggtcttgaaggaattttgacttctttcatcaaataaaagatgatcttgaagcctgtatcactgcttgcatctttgaccgctaggacatgagcacctttcttgccacctggtcggaacagttgctgatcaggatgtttttcgtcccattcactactgctcataggtaagccatcctcaccaagttcatcatttttacttggtatgattaaccagccatccggcttgtgtggcttgatatcagcgccatattccaatgcagatacaatttcgatcaatcgatcgttaccccaaaaaccaattacgaccatgtagcgatttaatatgtcgatttcgtgcttgattgcgtcccaatcgcttttatcatcagtgattttgatactcaatgttgcactactccatatcgattactgccaccgcagaataacttccataagcggtagtagtaaaggccccaaacgcttgaatggagccaatctttgccaattttggactcgtatttacgttccaagacggcaactttttcatccaaaataccctgaccagcagaagtatccatgctagccaagtgcagagccagatatttgatcgctgtaagcgtaatgtcattccatttaccgtcaactggctgagggaaaccatccgccaatgtgttaacggtcgcatcgtgaattagctctttgagagtgtcgtctgacatgctccgagttaatttaggtgctgcgttcttcaatgcagtgatcggtaccactggatcatcagtgttcatagttcccctcctttagctaattagcagttggtgtattgataccagtaatttgaacgaatgccgatgggtagcgaactgccaaaccaccatgacgttcaacataaggaatcttagtaacaccgtcgtggtattcctgttgtaattgagtcatttccattgcaactggaatttgtgcaatgtcctcgtcagttaagcagacaatagccatatctttttgcttgtcagcctttgaagcgttctttgcatgccagtattgaccttcaagttcaggaacagcttgaattgaactaaagtattgagaaaccatgtctctaacagtgatgtcaggacgaagctttgatactgggttatcaagcaagtcaatttcggcttgtggcatcaataaagttggctttgcgtttgcgtaaccaatcaagtgagtaatcttttggactgcttcacgtaagacattacgcatcttcaaggcaccgtcttctgtgtcttgtgccaacttatcaagtgcgtggtcaccatcaagagctaattgttggaagccggtcacatctgtattagtgtcagtcaagccaataattttagtgttaggaccaatatccataccgttgaaaatgatacggtcacgacgttcagcaagaccacgagcaacaagagcagcttgatcagcaagcaagttgacgttagctgcttgtgcttcttgaagttccatccatgagtactcacaagctaatgctgattgagtaattggaacttcatattccttgaaaccttcgtcaactactggaatgtcagtgccacggtttgcgtaggcttgtgccattgccttagttgaacgaaccttgtatctgtaagacatttggattgggtatactttgatagtgctaaataattgcaaagcaactagtggagcagtctttggatcgtaaatagtttgatcgatataggttaattgttccttagttgcaactcccatttgagccattaactcattacctcctaatttttcttggtttcagatgctggggttggcgtttcaggtggttgaattgcgtgtgcatcgtccttggttgggtcagcgccaccggtagtgccaccaaaacgagtgcggactaaaagacgtgcagttgagcctttatcagccgaacttaaaaaccgaccaactgcatcgtccgcagtggtcggtttaaatgaaccgtcagcatcaacagtggcaagttctccacggtcgacatcttcattaaccggaacattgatagttccatcagtaagaacaccgagaacttctcctggatgccatttatctttttcaatgtcgtcttcatagaagtggtcaacgtctaagtagccacgctttactgcaacgccgtagataggtgccttagtagctgtaactgcttgaccgttaactaaagaaacgccagcgccgaatggaatatcggcactagcgacttctgttaagacttcgtattgtctttcaactgtaccggcggatagatgaccgtcgtggtacatggttccatcaggaattgccattacttgttacctcccttattcttgtttgcaaggttgtagaagttttcatgcatttggttaactgaaacattactctcagcactgtcacccttgaagtcgtgaacagtagcaccaacgaagtgtgattgtttgcggttctttactgcattgaagtaagcattaacgtaaacgtcatccttgccatcaatttcagcggaatcaccatcaacgctcttgatagcttcaatcttcatttccttttctgacttgccgtgaggatcaaagctgtcgccaacgatagacttcacatcatcgatcaagcccatacgttgatcaaccaacttgtctaaaccgtcgccttcaaccttgtcacgataaccttgcaattctttttcaagactatcggctttggcttgtgcttctgacctgtcgttttcagcttgcttattgccgcttttcaaagaatcacgttcatcagttaatttcttgatttgtgcgttaagttcatcaattctcttttgatttgctgaattgtcagagtcaaacttgatcaacttatcagcatcatcggtagcgaccttgattgtttgatcgccaatgcgtaccttttcaaaatccatttgtggtttttgccctttctctttactaaaatcgtccagctcaccgatcatttcggcactatcgccgacaactgatctatcaagtgaaatgtctggaccttcccttgccacatcaacaacagcaacgtggttgatagtgatgtctttttgtactgagtcatattcagtattcttgtagacaccgctttgaggcacgacctgcgtttgaaagccaatactgagttgacgcttgccgttatcgaccttgttaatcaaatcagggttggtaatcgtcaaatcaactcgaactgtgccgtctgcctcatctacatgggcattcgacgcagtaagacctttcatcaaagtattcgtgttgctcttatcaactaggattcgctgaccagcttcattttctggatgattgtcagtgattggcttgttgtttgcactcgccaccgtgctgtcagacaagatatcctctggcagtttggcttcatgacgaacagtgccatccggtttcaggtatttaaaaacgccagctcgtgcgataggcacgtttctggcgtgaatgtaacctgtaattggatcctttgttatagcgctgactgttgatgagtcgtacctcgtaatcattacttaccaagtggtacgttgatagcttgatcaggaatgtagatcacttgaccagccttaacaactgggttggtcttggataagccgttgaagtaacgtagttgttggtaggcaactaagacttcatttgcaacatcaagtaaggtttgaccttccttaactgtgtagtttttgcaatttgtgtaatcaaatccattctttgccactcgtttcacctccttttttggagttgattgagcgtttaacgcagttttttcgtgattaactgctacttctggcgcatcttttgtggtttttggtgcgtcaactgttactttctctgagttaataccgaaaagtggtttgttatctgtcatgtcttacctcctaataaaagctaaatatcggatcagccacacagcggcagttgattggttcgccaggcatctgtccatcatcaccgccagttggatcgtcgtaggtttgacgagtgccatctagttcttgatgtttgggccgtactcggttatcttccattgattgccagacgtaatcttttgcgcccgccgctttgtgtcgactctcattgaacttagcaagcgctgatccggtttgatcattagcaacaagtgcagcatgtctgactgacataccagtttgtttaacgatttcttttgtaattacaccggtgccgtcaccatttgagatagctcgtgagatgacaccagtgatgctgtctgcatatcgatccttcatgtacttgatcagttggacgttctcagcaactcgtgcgttaaatatcttggtcaattcagggctatcacgtattgggttgataccagctatccgaatctgcattgcaacgttgttgtagctaaacatatcaatcgttctaacaaactgttcagcaattttgcgaatagttgcatcactagtggcttgtttgatcgtgtagcccatagcatcgaggttatgtagtacattctgttgttctgtttcagtcggattgttctttttaggtgcatcaccaacaatttgagtaccgcctttgaagtagtcccccatatagacgttgaaatactccatagcgactttgcgccactgataaaccaatctaacgatgcgtcttcgataagcatcttcaagattgcgaggatagcgagtgtgaggcattcttctatgagtcgtcatgtttctcagctcgtttcttgtctttttgatagttatccacaatgttctttacagtttcagcatcaacactgtcacctgctgtctgcattgctgggttagggttggtgtcttgacctgctagcatgtcgtggacttcgtccggtgcaagaacgccgttagaaatcaaactactgtaagcattagcttggttcatgaagatttctgagtttgtcttatcgtccatggtttgtaagtcattgaatacgatcttccaatcaagttgatcagggtcatcaccgtttgcgtacatcaaaatacgagtgatctgttcaatttcaggctttaacaagttggtctgaattgccttgatgctgtcgtagtagttgatgacatcttgtgatgcaccagctaatgtcccagcttgttcaccagttagaacagattttggaataccacatgcagcactaagctgttgccatacgaagttgtaaagcaaatcaataccgccggttggtgttgctaccttttcaatactgtcttgactatgaccaaacgccattgcttctgtattaagtacttggctaatctcacgcttatcacgtttaaagtcagcgtctccttcttccatcaactgatcagacttgtaaaacttgaaagtaaattcacgtaacatcttcccagtcgattcaagtgcgatatccattgctttgagttgatcctgacatctggtcagaattgacgtacctgtttcatcatcaatcgacttatcaagtgcaatgtgccaataccggctttgatcaataactcttggagtgtttctcggagtatttggcgtttgagtaccgttaggatcgaccttgtaaccggcgttttgtgttctgagtacgattgcctgctccttaccatagttaagactgagtggatcatcgttagacaaaaccttgtcaacgtggttttgaccaaatgcatgaatgaagtgaactttttcaactgtggttggatcaagtggcttacttgaatcggcatcgtcattttcattaacaccaatagtgatataaccatcaccgccttcacgttgataaacgagttgctgagataaggcttgtgtagtcttcaaatcataatgaagccgttgatacatcttctgacgttctggatcgtcttctacaatcacccgaaaaccatttcgggtagcatcttcggctggtttatgaacgatacgtcttgcaatagcattgtgttttgtctcattgtgcagtgcatcgtagtcttgttcatcattaaccactcgccagcctagattgtcataactggtaaacggatcaaggtcgatgccgtcaccaacaatggttctctttttcggttctgattttcttctgctaaatagtcccatgtttcctcctttctaatatctgataactggtccacgactatggttgtcgtgaagtctcttaactgcgtaaaccatcgagtcaacgttgtcgtcgtgcattgcgttaggaaatgcaaagatttcttcaagccagtcctcgatttcaggtcgccactttggatgtggcacatagatgtttcctgattcccatactggactaactgatgctgctcttgcttccttgctatctgcaccaggtgaaacagcaacgattcctggtatctcgtgttgcaaggcatcaatgatagctggaccattggctcgatcttcgaccaactttgttgttgcgtctgggtaaaaccttgtcatagctctaatagcatctagcgtctcagtgaatgacaaacgcttgtgacaccagccaggtcgtagatataagtcagcgtcacttttgctccacacttgaccagcgacaaagtcatcgttggctttgctcttgaaagttgcgtcccatgcctgtactgatgtatccaagtgtttaggcaatatctttgcgtctttatcagttaagtgaagtcttacttgtgtttctttatcaggaacataaaacttcacccattcacgtttgaagatattaccgccttcaactgttggactttgttggtacaaagcagtgaacttttgagtccccatgtcgtgcttgttgccaagtagttcatcaaggctatgcaagtcaggacatagtgcctcgccattgtgtctgcctaatacgtctgtttcatcaggtccaagaccggtagcaatagcaggaagtttgatttcttcccatgggaagcttgaattatcaagtaagcgtcctgccaagtcgtcctgttgccatctggtcataattacgatgactgagccacctttttgaagtcttggcttgaatgttaataaccattcattccaaatcttgtctttaatcgtaggtgatccggcttcttctgcgttcttgattgggtcatcaataatcaacaagtcagcactcataccagtggcaccaccaaggattgaagttgcatagaaaccaccacgatgatcaacaatgttaaattgctgagccgtgttttttccaacttgcaaagcatgatcagcatctggtactctttgagaccataaagaaaaaagccgtctatttgattctgcaaactgactgtataagtcttgtgagtaagcagtaaccataacgtgcttttcgggatgcttcataaggtaatagcttggaaatgttttggtgatggtaagcgattttccgtgttgaggcggacatgaaattatataaaaatgttgctcaccatctgcgattttttgaagcagtgaacagatgtacttcgtatgtggatacattgtcatatctgggtaaacgagttcaaagtacttctgatatgaccgccaagccagttcatcttttagttcattgacagttagctttttaaactcatcgagtagtgctgtatctgtcacttgctatcaccgccttcaatagattgaatcatttcttcaagttgcttatcggacttcttggatattaacttacgcatacgaccggacttgtcttgtgattcattagtacgtgattcagccaaggtagcctctgcattgagtttacgaagttgagcctgtgtgattggatcatctgtaattggcattctctttagtaactcctttgcagcatcaatccgattcttccaatttggtggtatctcttcaacgccatcatcagtctctacagtgatttttaatgtcccacgcataactccacctaaaaactctaaaacctctttctgctttggaattttggcttcatcgatctgtttcatgcgcttgttgatataatcgttgacggggggtaatcggagggtacgttttgcctctgtattgatcgtttcaggtttcattcgatcagttacatacgctgatttataggcttctgtggcgttaccaatttcaatgaacttatcagcaaagtctttttgttttggtgtcaatcttggaatagtttttgacttctttttctttgcttttttcttcaaaactggtttcacctcctaaatcaggccaataaaaaagacactgaacttaatcagtgccgttgctgtctttcaagtcgtcaattctcatattaataatgaatgctaagccgtttagttgattagattgatcaatcaataattgcttttgagtgtgaccaatctttgcacattcagatgatcttagaaactcttgaatcttgattgatctttctgtatatccttcacgttctttgatcaacttgctaattaattctttgttttccatgatgttgtttccctctttttttatgtttgtgtttctttttgtgctcgacatctctttcaagttcagcaaggattttgttttcttccttacatgagacaagaccatattttttagtgcgatacattgctgattcctttcacacgaaaaaaagcactggggttaaccagcaccttaatacgtgatcctgaatgtgttcatacataatgtgttcttgattttaactaacagaaccacgaaatgagcagtaaaggaattgaacctaaactgtccgccattggtcaatttaattcgacagaggaaatctatattggaaaaactcgcaataatcgactcatcgacggacagacaacgagtctgcccagaatggtagcagtttgactactacctaatacaatttgagagattttttataatgatttattgattatcagttcaccaacatcactgctggctaagatctaatgaagtgccgaccttcagtgcatgcagagcaacatgatcaaggggagattttcacctccacaatttagaaaacatgtacgttgccgaacttagatcaaggggccgccttttcaggcggttaggttaggaaaaccttgttatcagaacacggactcaatagtccttttttatatcaatgctccgctcgcttgcggtcatcgcagagctaagacgtgaggcaggtattctactgcgacacgtcgggaaacatgatttatcttgtcttcaagcatttgttgaatcttcgggttcaaattcaataaaaaacaacaagattgattcagcctcagtatttctgaggctatgacagcatctggattcgaaccaggtaacttgcaagccacatagtatgcaatgctgtcactctaatttacaaggagaatagatctaattggtaaaaatgaatttccgtcgcatcggtcgaggtagatctcctatctactttctcgacaataacaattatctgcttttttcatcatcgggcgatcccaacttaatcccgattaaatcccaagcaaatccttttcaaatcccggtatgatcccactttcatcccggttacatcccattttttcgttttcgcgtagtttgatctgctctccaaccagcgtctgctagagtttcaccaggataaatctgcaaatcaaaacgatcagcttcatcaggaaaatacttgtcttgtgccgagatccaacactcagcaaattgattcaatgcaacattcttgaaatcaccgaactgattatgattcatattacagtcacgattgatttcccatactttcttatgtaagacgtaaaattcaaatagtatctgaggagatacacctgatgtatgatcaatggcatatttgattgctttcaaaacatcaaatgctgccagccttctttccatcatcttttcttggctattaacgccatttgagtgagcgggagcaagtgatagctggggactagataaactaaccccactgagccgttccattctgttaatctggctgctgagaaaatcatctacattttctgctgttaaaacttcgtctggtaaatcaaataaaaacactgtcccactcctgtatctcttcaaactttaaaatctacatcacatcattatttattttgcttattgagtatttctcctaatttcttcccatcttcaaacgcttgatcagtactacctttataataaccggcattgtaattggcttcggcaatgtccttaaccaattgtgcaatgaccttggcttgttcaacggtggtaataacttttgcattctctagcattttatagccgtcttcgttgatgacatcataaccactctcagctaagactgactttaattgatcaattggtttcatttttatcctcactatgaatctctaagcgcaatttcaagcctgctgtacttacgtaatgatcagctttattgcctaacttccagaaatgaaggttcaaatcgtcttctaaacgatagatgtgaacgccatccgtgattgtttctcctacaccaagtactaacaactgataatctccttaatctaaacttttatcttcaaattcattgacgttaccaattgacttgcccttaacaacatttgctgagaacttaaccttgtcaccaggtctaattaagttggcaaaatcataatcattagtattcacagtgaaaatgatatttttgcccttcagcatgaacattgccttgttcttgttggaaacaactgcagctcgattaatcacgccagagaagtttttcttcttttcacctggtgtgttacctgccgaagagccagaatcaacaagagcctgtctaaatgaatccagagcacttgttggattgctaccagttccataaatgctttgatcgcttgcatctaagtagtaatagccacgaatagcatgagttgaatctaggatagtcattacccaagttggacgattatttacgttatagagaattggcatattagcacgccatttttgagctttgtagtcttgatcagcattatttttagcgccatcgctgtccataatgttgttagttctgtagaaagtgagcttgccagttcttgcattgatcatgctgtaacctaatgctgaatcagcaccggttctatcagtagtaaagtcagtgaagtaactaatcgaaccatctttgttgaagactgaagttacaccattttcaacgccatttccggtcggcttcatgatgccggtcttgctccagttccagaaaccatacttatatttaccaaaatcgttgttgatcttatcagcaatgccagtcgtgatgccttcgtcaatgaacttaggcatgttgtgcactgaataagtcttagttacaccggttcttgcatttaggacagccacatgtaatctgccgaagttaaccctatggctcattggttctgacttgtaaactgtttgaacccaataaggatcaccattgtcatcaatttcaagttgtggcgtatctaaactaagccaactaggattgtggcggtagatttgacgtgacgcatctttgttgaagtagccacttactgcgtagtaataaggtttcttaacaaatcttggtgttgcattttgtctagtagcatcaatgatgaaatagccaggaatctcaccagctctattgctttgaaaaaatccgttatattcaattggaatcacataaactggcttgcctttgtagtactgtgattgaatttcatcagaaatcgaataatattgcgtgtttggaatatcagacgatgcttttctaacacggttaataactgttttaggtgctaatgcaattggagtttcattgcgcttgaatgttggcgcttctgtgctttttgaatattctttagatatagaatcccatgttggcttaacagacatgtgtgagtgcaatgatccgcctatacaaactaagaacaaaatcactaagacggggatgcccaccattaaaaactttgaactagcatcgtcatcatcgtcataagcctgagaagctaacgttaaataaaatatcccataaaacgtattaccccagagaatactcagcagatttctcgacggtagcaagaagtaagtaataaccgctgctataatccagatcggcaaaattgaaataaatgcccaaattttatttgatgctgtggctaaaacaataagcatcatcactaatggcaaaattgtgtaaaagaaccaaattgatatcatttttcttccttccgtttacgtccatattttcgatttctaataattttaaataagtcacaggcaactgcaccaaacataagaaaagtcatcaccagtaagcccataaataagatgatcaaaagaattttaagtataattgcagccatctccattaataccactcctttttatcggtatctggatagccataaccgattaatccttcgtttacaatctttagcgcatcgtcaactgatctcgcaataccgtggattacttttctgtgcaccgacggtgagcagtgagttaatcactgctgtgtacttcataatgtcatttgatctcatttggatctgtcgttttcttttatctgcttgcattagtaatcctccatattttgcttcaagtaatcactcatgttcgaatacttgtgatcaaagtcgacaggcacaagagcatgatgtgctttcacatagtcaacaagtgcatccccgccagtcgccatcataaatcgtgactttcatgttcttcttcatcagggctaataaattcttcattattgttaacaaaattaaaagacctcatagcaagattcattaagaaatcagttctgtttttcttagcatcaatattttcaagaaaaggtatcaaaccattttcatctaaaagaactaaagctctattaatcaagtcaattgcaaccgcttattgatcttgtctagttagtttttgattatctatttctatttctttcatactagatacaagtgcagcagaagttaaatagtcaattaccatttgtctatcagttattttcatttttatgctcctcttgtaaagctcttcctgtaactgttcatatgctacttatcgcttttaatttccatcatgatcttcaaagttctagtaagatcatgatttctttctacaagccggtcatttgtctgctttatctgctattttcttcatcctcataaattactactgttactagctcgttattctcatctttaagggttactgcattaacaacatcatgaacttttatgaattcgttggggtcctcgccatcagaaatattaaattccttttgtttaaagtgtctgtttcttttttcttcatacatcactagtgcggaccaatcgcccttaccgtagtcgtccgaaaccacctccgtaaatttaatatcgatgatttttttaccttgaataaactcattaatctttttatccaaatcaggcaaaaaatgagaccagagtaatttaactttcataatcttcacccctcaatcattacttttttctttatctgtcatttctttaactccttttacttttaccagtcttctgttcccttttcttgcaaatggtggaaaaaccaaaacctattgcatgtgttacaaaggagcgtaatttcatcaattggctttaacttagcaccacaataagggcatttatagccatagaaatattctggtgtcctattttggaaaactggctcatcatgccaatactttgaatttttcatcttttagctcctaaaacggaatatctccgttgtttctaagcaactcggttaagccgataaacctagcatgcggcgcataggtagtgaaccatgctgtatgctcgtcaacttcccaaaatctgcattcgtacctcgtaagagaaaattcggattgcaaccagtacttttttccgtcaactagctggtcggctgacgtgattaattttctaagtctattcatttcttgtaatgcctctcaatcttgatttcatcattcagcattgttatcaagtagcctattgggttattcaccaagtatgctgaaacacgctgatcatatactttgctaagactttcaaagtcatcatcagataacatagaaacttttaatctgatttgtttaagttgtcttagtgtaggtctaagatgctgattgaatgtcttattgtaatttctgatagtgaaccataatttattcattcttgaatttatttttgtttcttcttcttctgatttgtctttagagttatccacagtttcattctgaggggagggtttcgatttattagaagaagaattaatattattacttgtagtattatctcttgtaatattctctttgacattttcgtcaatagggtcttgatctttttgacaataccctattgatctttttgtcaatacctccccttccacagaaacgtatatcctacgttgctggactgttttatctgcagctctaattatttctacttgaatatagcctttctttttaagatgacttatccaacgtgataccgtttctttactgacatcatagagtggagcaaagtaattgtttgaagccgtgcaataaccaaacttgttagataaggcagttatttcactataaagaagcttttcattaggtttaagatctttatcatatctaacatatgctggcattattgagtaataacttggttgattcattttactcacctagctttgcaaatggatctttcttcttagttgaatctttcttgccatcaacaatttctttgattttttgatcttcggcatcttgttttgacttttctttatcacgatccttaagtaagcccttagagaactcataaatagcgctgatactcttaatagcaatcttcgcattaactgaattgcctttgtctttgattacttgctttgctaactcatcaccagccatagccattgcaaacacttcagttaagtctttacgcttgccatcataattaattgtcatgcctttaagctccttaggagtcatgtagtcaggcttagagttaaactccttagcatcagtgtcgtcttcagaagcgatgccgtagatagcgctgattgaatatctacgagcgtaagtaagtgccttaccgtattcctgaggattaggactgccgatgtccaacatataagaaccgaagtcgaagatcgcacctttactattaagcaagtagttatgaataccggtcttgccaccatcggttactggttgctgaatataagcgatgtcctcatctgaacttgcttcttggatagctttgataactccgttcaagtcagcatatttatagccataaccttgtttatctttacttggctgttgcagctttctttgaacattaacaaatgcactcatcaaagccagttttgccttcaatgcatcttctggcttcaatcctgagatagctttgaagcaaatttgtccaatccagtcggctgggctttctaataattgcatgattagccctccaatccttgatattcaataccgttgtcctttaggaaactttgtagctgcttcatttgccatggagtacccttgacttccaacttaagtgagatcaccttttctttgatctcaccagtttcaggatcaacgtacttatctccttgctttttaaggttgttaagttcattcaacttggttttcttttgagcttcagagacggcatctaggtcttccttgtattcggacattgcattaagtacgaatgacaaaggattattatctagtgctttgatccagtgatcagcgggcaaacctaagctttcagctttttcactgatgatcttgatgttgtcagcaagttgagcttgttcttgctgaatcaaagcaatttgttgatcgacttcagtttcaaacttagttttgctgtaggatttgttgtcccagcttgattgatatttaatttttgtaggatcaatttcagcaaattcacacatcgtcttagtgtgctctaaattattttcgtgtctttcggcttttgccttatcttcatatactttgataccagcactaatttttgcgcttgaatcgtcaattttagccactaacgattccactttatcgttaaaatctttaactggcgcttcagctttctttttaatttcaactttgcgtgccttaattgcttttgtaagcttatttagctttgcgcgggtagacttagcgtcttttaggttgtcttgcgttacatcatagttttcaagactttcatgtaactgatcaatttgatctttcatttggttatatccactgaagtcaatttgtgcaggtgcaaagttgactgggaatgctacagccttttcatctaatttaattaattgattttcgttcatgattagtactcctccatacctaaataactggttaatttttggcaattataagaatcttcgataaacttcaaaagatcatcaccgtagttgctaagatctaaaataaaatcaaaatggttaggtgaaacatcgttgtagtccatttcatctgctaacttgtttaaatctccgttgtaatgatttaaacgtcctttaagaaattgagctgcagatttatagccgtttacgaagtcgtcagcagatttgccaattaaagcctcacggccttcaggcaactgaacaactaatgtgtcagggtcattttctgcttgtatttcaagctcttctaattccttcttgcgattaatttgttcttgtgagtaaagcattgtggtataatctccttagttactttttggtttaaagatatttttctttgtccctttagctctgcaaagctaaagggctttttttatgcctaaaaaactcttgatgtaggctggaagttcagaaaagctcccgctagcaacatgcaaacaattgctattagcaaggcaattttgttggacagcgctaaggaaatgggcttgtctacgagatacaaagtatttaaaaatctgttccataatttcatgtttcctcctatttcttgttgtgcttaatgactaatgcaccaattacaattactaaagccgttacgattgataatgctggcaaaactacgtctggatggttctcgccatacagtacggtctgctgaaccactagaagtggtacgaagatgattgatagaaactcaaggatcttctcgaatgccatgcagaagtaactcagtgcgtgatccagctttgtttttccatactttctttcaatttcctttttagtcatttttctataagtaacctttcactccacgagttttccaaaatttatctaaatccgactttttccatcgtgtgatcccttcaattgtccgagacggaattttgtactttttacgccagcttctgaaagttgtatcgctaactccaaggtactttgctgactcaccaacattgagccactcacgtgaggacagctcgattatctttttcacgtcttttttatctagatttgatttaagttctggtttcatcgagatcacaatggatctcacaaacttagttaaattttcttcgtctagaagctgcatcgtttatcaccttcaatctgctacaattaaatcagccttcaataaggaggtgatttaatataaaatttgatgccgatactataactgccgtgattgctattgctgctataatttctcccgtcatagtaactatcgttaacaatgtgcatagtaataagtggagagaattagaaattaaaactaaacattttcaaaattcacaagataaaatttccactttgaatgatttagttacaaatttcgttgcagctgctaacgttcttaatacatatgagcaaacgggtggctggcaattaaaagccaacgccagaaatcaatttgtaaaaagcggttctaagttgctaccatatctttcacccgattatcaaaaactaatgcaagactggttaaagctttcgcaaattgatgataaaagcgcctggttttcgatcaccaaacacattaataatgaatctgttaatcttttaaatgatgtaaaaaagaacgcatacagtaagatcaattaacaaaacgtacaaataatatggccagcttaatgcaaaacctgtttgctttttgatcacttttcgatcaagcactatagcaatagcacttattgttaaaatcaaaataaaatataaatttttcattgctgaccttcttaatagatcgtggtatcagagccaaattcggctcccatcttttcaatttcttttttagtaatctcggcaacttttgaagctgatatgctttgcatgttggcttttttatttcttctctaacaatctttctgacttcttcacgttgctctggactaaacttttccatttagatcacgctcctgtctcgaattgattcgattccgtaaatttcttcgtaatacttatcagttctgtattccatgaacttgtcccacaattctaggcggtaatacaatcttcgtgctccgtcatgaataactgcttttttgtagggactatgttcacaatctcttgtacgtctcatcaatgtcgaccggctgattttcagctttgccatcatttcttgcttgtcagtaaatccatgatttacacccctaactaagtaattcaccacgacgcttcaattcagcatcgatcttgttggtttgctctgttaacttttcccattcttccttagtgatatcgagtgccattctttgaataagcaagtcgcataacttcgaccacaattctttagtggacatagctgctagaattgtcattttttattacctcctagacagatgtcactcattccaagttgatcacagatgcttgcgataatttcactgttgagatcttgaagatctttgatagttgctggacgtgtaacaccaccgttgccatcgaactctttaaccattccaaactctgtttttgaattattaagttcattgagtgcttcaagttcttcacgtatgtttttgtagcaattcatttcaatcacctcctatgcaatgtcgtcacgttcaatcagtggcaaaatgtcgttatcttttagaacgtcgtagataagttttctacctgcttgcgtccaataagttgtcgttctgcttcgatctctgccacgatgatcttgaaaagtgaatgccttacttgctacgtaacctttacccatgtatgccttgtaaaggatccattgaccgttgaccttatgctgaataccaacagatttcagaagcttgttaaatgccattgcactgtatccgtaatctgctgcgatttgagtagttgctagtagatcaggagtgccaaggatcacatcgagataactggcctttttgttactttcttcgagttggatactcaagtttttgttttctaatttgagttgtttgattcgagcatttgaaaattccaatgctctatgcataaccatttctgggctgttccatttacgctctaggtctaggaaatattctctataaagctttgacttttctgttcttgccatcattgctaattgcttagccatttcaatggttaataaataatcatctaactcacgaacagcgccgttgttaacaaccgtacttgatgtacacttgtaaaaatcctcattttcagtgaatagttctgaattagttttgaaccatctgctaaatcttccttttagtccaagacctttatgtaagtctcttgcactaacaagttgacgatcgtttttgacttgaactttcattagttcttccatttttgcactccttttcttctcaaaacgggtaactttatttcaaaaaaatatctggtgagatacctaatgctttggaaaaagctaccgcaaagtcagcatcaaacttatatcttccattaagtcttccgcttagtgtaggctcactgattctcaatttatcagcaagccagctctgcttaatgccatgatcacgcaagtattgcttagccaatgctcttgcgttgtctttcaagacacttgccatccgaccatttcctttcttctcatttcgtgtaactcgattacagttatatattactacccattttgagaagagtcaacatttttctttactttttgacaagaaatattttcaaatagtaaataagaatttacaatatactcagaaagagaagaaaacaaagaggtgcagttatgagtgtattcggtaatcgactaaagacaatgcgagaaaatgcaggctggactaaaacatacgttgctaacagactgtatcttccattaactacttatgcaaattatgaatatggtaaaagagagccagatataaacactattggcgctatttctactttatttaatacaacaaatgattacttaatgggcaagactgacgacccagagcctaatccatccaatttatcctctgatgacttggctgaaatgcttaacaacgtccgcagttataacggcaagccattcgatgaacatgacaaggaacttctcacaactttcttaaaaggactatacgctgacaagtaggtgttttatatggatagtaatttgaaaagattacttaaaagaaattatttgggagttgcttatttgcctattcacggtaaaggatatctagtcagaactaagggaaacaaaaaagactacattattgttaatgagaatctaagcgatgaggaaactgaaaaggttatccttcatgagataggacactacgaacacgacaaggaagttcttggcagttataagcacaatttaaggtcaagagctatcagtgaacatgaagccaacaaattcatgattcaccaagaaataaagagctatataaatcaaggctatgatgccatcaatatcaactacgttaacttggctgacagtctgggaactaaagattattttcaagttaaggaagaactagaaaagtattgtgaataattcgtccagggtaattggcaccaatgacgttaaacttcgtgcctagtttatggaggatatagaaatggcaaaggaaataaaaggtgaagatggcaaaacctatgtcgtcaaagaaaagaaaccttggtataagcgctggtgggtctgggttatcatcgtgattgttgcaatctttatcgctggcggtgctttaagtgatgatgacgctgatgattctgacagcggttcagcaaagacagagcaaactgccaagaagaaaccggcatcgcataagaagtctgctaaaactgaatcaagcactcaatctaaggagtcaaagcctaaggaatcaaagccaaaggttccagaagaatataagaacgctttagccacagcagaggaatacaacgaagaccaaccaatgagtaaggctggcttgcttgaccaattaacttcaaaagacggtgaaggttttacacaagctgctggtgaatatgctgttaaccacattcaagttaactggaatgaaaatgctttgaagtgtgccaaggaatatgaaaagaccgaacacttatctcgtgcagacgtacaagatcaattaagtggcagtgttgatgatggtggcgagggtttcaccccagaacaagttcaatacgctatggatcatttaccaaagtaaagaaggcttaaaaatgaaacatagatttttagtagctgcattggcatctgtaatgcttgccagcggtactggtgcagttatcgcacctagtcattcaacacaagtacaagccattagcaagtactcacaccactggcactgggtaaaggtaaccaaggaaacaccaatatataaggtcaaggttggacgttatatgtatcaaagtaagttaactcataagacttacattgagaaaggatcagacttgaaggttatgtattccggtcatgactacccatggcgtgtatacggtggctggcgtggtcactgggttgctttaagacaatcagcgaactggttcaaaaacgaatagaaaacaaaaatcctgcctaccctattcaggtaagcaggatttattacacagttggttagaacgttagtttgaaaggatgatgatatatgcctcgtagaaaagacaatgagatctacaagtacaaattgaagtcgggcaaggtcaagtacggatttaaaacgtatattggaactgatccagaaaccggtaaggcagttaagccatctcgccagggctttgacagctacaaagaagcggaagcagctaagaccaaactaaaagaagagggtcctagtaagtttactcataagaaagaacagaaagaaaaccgaaaaacggttcaagaagtatatgagatttggctagaagtttatagagccgatgtacgtgggtctacgctaagaactcggaaatctaattggaagaacaacatagagaaagaatttggaggcgtatatatcgacggtatcgatattaaccacttacaaagctttgctactaaattggcggaaactcatattaattaccgttctattttaaacttattacacagagtaattaagtatgctattctacgtgattggtgcgacagagacccttttgataaaattgtgatgcctaaaaaaacgaaggcaaaaagtaagcaccctgctaataacttctatagtttaagcgaattgaaaacatttcttgaatgtgccaaaaagtataaagagaaatattacgtttactttatgacagtgggtaatttaggctgtcgcccaggtgaggcactggctttaaagtggaaaaatatcgacttcaaaaacaaggaaatttttattcagcattctatcagtacagatgaaaatggcaacaaaatctatggtcctaccaaaacacctgcgtccgttcgcaaagtccccttatcagatcagttggctatagtactaaaggagtataaagaagaaacaatctataaaaaaggcaatgattttatcttccacaaagataatggcgatttttatgagcgtagcgcaccagatcattggattacgacgctctataacaactatccgctacgaagaatcactcctcatggctttagacacacactggctactttactaaataatagaaaaaataatgcaaacattaaagatatacaatacttgctcggtcataaaaaagcttcaacaaccatggatacttactctcactttacaaaggaaaatgaagagcatgttgcggaatcgatcaacaaattggatatataaaaagagctttttacgtaatttttccgtaaaaagtctcttcactatagttattactgccgatttattgctgttaagcattgatatatcgacatttattaaattttgttttgcttaatatcaataatcataccattaacagctgattgtgcgccgtcattaacccatttgttttgacctgcttgtttatcaaaataaagcgagtaggtaattgagttaactaattgcattgctccttcaacatcaccctgctcccaacttctaatgattaactgtagtggattaaatgcgattcctttgtttgggtcatctaaatttaattcataaacatcatagccacgcttcctcaacgtatttacagaagcaacatacagttctcctttaggatcattcacgactagtgacgattgtttttcagccctacttactaggtcgatttgttctaatatagtagtttcacctttaccagaccgtgaagtacccacaatcaaattatgaactgtacttgtatcaatgaaataatagccatgtttagtaataaatggaaattttttggttaatcctaatctattaatgtgagcaatggggaacccaccaaaacctttaaagctaggctttttaggatctaaccctggttgactatgatcaggaacttttacataggtgtcttctaattccttaactgtagtaaaacgggcatttcccttttgcccatgagcgactttttgactttcaaagtggaatttttgacttaacaatccaccaataattacgctagcagcaaatacctctaaaatttccatgggcttcaactgtgtcttaaagaaattcaagccagctaatcccgctttatctaaatcgagaccattcgtgaataagttatagtttttacttttaatttgtaacatgacattatggaatgctcctaataaccacattattactagaaagataaaaattcctataaccaacgttgttatcagcttcgtataattaaaattaatattgctagactgcttgttttcatttttgggacgatgtaattgtctttcaacttgatacaagcctttttttacaagattcttttccttgtttctagcattttttagatttattcgtgatcttctctttttagtacgcatatctaactaaccacccatcttgccaatcagcaatatcatagaaagccaatgcgacagcttttttagctgagttggaaatttctgttcgctgatcatcagttaaacttagccaaatatctcttgtctgagctttgtcttcattagcaattgcactgtataaattagcaattggatttgaatagattgtagcaatcttctttaaatttcttgcatcaccttgccctaataaaccatctagcatatctctcttttgtgcccaagtcttagtttcacgatattgttttaaaatagcttgtgacctagttaaataagttggagtagatttagtctttgatttagcattagttttttgatttttagcaatatcttttttagcagattgcttactacttgattgcttgtttttcttgacatgcgagtttgaacttgatcgttcaattgaagctttttgttcattattagaatggttattagtataagcccatgtaccacccaaagccgcagctgcaaggcaaactaatgagataatttcagatttatagtgatgtttcttagaactgttatcctcggtttctggctttaactctgaatcttcttcatttgattcagaatcaattggtgcatcatttttcttagtatcatctaagtctactacttcaccatcaacatgtggcacaggcactaaagcattctttccatcattatttaaagtaatttttacgttaggattttctaaattattttgagtaattgctgcagcaattgctttcgcaaattcctcaggcaactttgccatattttcttgttgcaattttgccaaagactcattctgctcaattgctttttgctttaaatcaagttcacgttctttgcgagcagcttctgcttctcgctgacgcttttcttcagccttttcttgatcaagtagcttttgttgatttatttgttctttagctaatcgaactttttcttgaaccttctttaaattgtcttcaaataaatcattattcttgtcatagttatttctaactgcatgatcaaaatcattactaatggttgttctactatcatctaactcagaatttcgtttttgtacttcttcatcacgcgcaacacgttctactttagctttatcagcctttaattgttcatcaatttgttcattagcattacgagttttaagttcttcttgatcattaaaattttttagagctaaatttcgtttctcttctaattgtttcttatactcagctaatgctgcttcatcattagtttttagttctaatgccttattttcttttaacttgctcaagtcagactgattattttgcttctgttgagttgctttaactactaactgttgaatctgtgcctctgttctgccttcaacaattttatctagtgactctttagtaactctgttatatgcttcctttaatctatctacaattgcagcctttgatttcgctaaaccttcatcatatacacgttgaatatcctgcattgaataatctcttaacgcctgattgattttatcattcaactcttgttcatattgatctttagggttatctaaatatcctagatcatggcggatattatctaaagcaaattgatttttatcatatcctcttggtaaacgatcaagaatatcgttggcatccgtgtatttaccataactaattacttcactacgattagtttctgtttcagttgtttgacctgcttgaattggtaaagcatcaacctcttcaggtaattgtgtaggaacattattcaaactaggattggttgcggcattactatttgattcttctgttggactgttatcctcagtctcatcatttacatcattttcaggaggtatttcatcacgcacttcatcatctgaatctagaatttgattattattaaacatgaacccattgtctttatttaaatcctcttcatcatcactcaaactaggttcaagttcattaaagatttgatcctttagtgttgttactgtttcttcttgatcacgagttaaattttcattctctaaatcacgatcaatcaagtttaaaatacccccgtcttgatcctcaggtaaaatttgtgcttcaaagctgctctcttcacgatcctcatcttcatcatcaaagatagtaaatgtaacattagaatcagcttcttctaagctctttgcatagtctttaactgcatcatctgcagttttaatgtctaactcaggcgatttcctacttaatttatgcttaaattgaaaatattttttcgccccttttggtaccttatcaaaggtaactaatagcataatcttctctccttcttcaacgcccaccatcaacccagtaagtcttacttacttcaccttacttataaattaactatctagcattccaaccaaacatatttgcgaatgatggtactaaacttgcagctaaagcaacaatggcaacacctaccagtgcatacatcaataattgctttgcattttgcgacattctgttaccaaaagcaaaaagaataccagccaagataataacgacaatgaacagacctttggcgatattcttcaggttcttttcggtactaccagtagccttattaatatttctccaaacatcaagtaaaactggatgttcgtttaaaaaagcctgggtaccgattaagccgctccaaaataagtaggtcaatttggtataaacagctaaaaacattgttaatcctccttgtataaaaaaagcatttagttagctaaactaaatacttttacttgtcccattaaaatcacttgtaagcttattatcatcttttgatgacgtaaccttatcatttaaagtcttatcaggttcagcaatctgcaatttttctaactgttctgataattcttttttacctgcgacttctaaaactgcatctttatatgcgcttttagtgcctgagatcaaatcttgcacaaactcaaccataattttttcttcccaagccttttgtgttaagccttgggaattatgtagcttgcgtaaaatggacttgtcttgtttgctaagaaccatttttcctccttaactattgcccaccatctcacccgaaagaaaaagaaggattagactttctcaccatttcatctaatcctttatacgttattcgtctttgttacctggtaatgtttcagtttcacgcttgttgtctttatcagtgtttttattcttgtccccatctcctgttgggtcaacatcttcactggtatagtcgcctgaaacctcgatcttcttatctgcagaagcctttggtgtctttggcgatacgtgagtaatattacttggaatatcttccttgttgaacaagaagtgtgcttgatttggtacttcaatttgtccattatccttgttcaggtagtcaagcaatttaggagtattgattaaagtagtatcaatgaacatcttcaagtgcttaccatgccatttaccaggctcggttgctacccacgaaatcttaccagtcttattattaacgtctaatttaccttgatcagtaatttcttttgctttaccagcactatctttgtcgtcatagtcataaaccttaacgctcttaatgttttgaacgtctgcttcgatagcatccttaattgcaagagaatcaacattcacattatctggtacagtagcttctacgcggtaggtatatttcttgccaaagtctacatctctaagtgacttagaatcggctaatccatcttctgaaacaaacttttcatcctttggattagtaaatggaatattagtagttacttgattagaatctgcactaccattatcttgaattactttggcttcattgtaaattacagcttgatctttatgttttggatctgcgtgatcctttaagctctcaccacgctttacagttgcatcaaaggtaatcttgtaagtttcattgtagaagtcatccattgccaaagcatcagattttgcaattactgataagttattacctgaggataaggttactgtgaaattgtaagtaacatcttgatttgcacggttataaactctaattgagcctgtatcaatattcagaatattatctaaattatcagtgattctatattctgtatattttaaacgcttttcaacatctggtacagaatgtgtaatttgatagtgatattgttcatagcggttatcaagcatatcatgagttactgatttaattccaccgacttcactaggtgtatcagttccttcatccttgtcagaaacatatttattaggattcattggtttatcttttacaattggcatatcaaacaatcttaggtaagcatggttaaaagtaccattccagatactatttgaaatagaaaccttatccttatcagtcattccagcatcaggatcatatttaccttggttcaattgccaattatcagtatctgcttcaatttctgtttggttttcagctgcatgttttcctgttgtagtaccaaaaacccaatacatattaatatggtctgtgtttgacattgttgctgtatatgcagccttccaatctgaggatcttacagtacctgaaccatcaggtaaagcggtatggtgttgattggcatctgaaaagatgtaattattgcctaaagtatttttataacttaaccaagtattaccatccttttgtccatcgccccaaataacttggtcaatcttaccataagttgatgtatcatagcctacccattggttaccatcaatatcacgtacactttgatttaagttcaacttcaaaggtttacctgtatcatgatcaataaaatcaattctataagcaaccgcaccttgtccaggtgtgaaaacttcaaaatatggacttacaccaaaggcaattgttggattctttaatggaactttttcacgtttaccatcagatgtatcctgccatttgtaggattgaatattccaatctgttgcggtgattttgacatcaatagtttttccgctgttaggatcaacaccagtgtttgaataataaacaccaattttcccagctaatttttcatttcccataacagagaatgcataccaagagtgatgtttgtcttcagtattagtacttgaagtagcccaatcttgtgacgcaccaccaaaggcatggattttagttacaccctgaataatcttgggaataaaggcatatgaacctgccatttttgttccaactgcgttttgtcctttcggcaaatttaccatttctgcattatccgcatgtacaatgcctgatctagtagcaagaaatgtgcccagactaaagccagtagccattagtgcaattgcggctaagctgactactttgtttttcttcgttagagaaatcatataatttcctttcttttgagtaacaaaaaaagaagagccgtttttatttgtactcttctttatacttaattattaaattagattatttagttagcattattccaagcactaacccattctgggcttgtaccatctgcagtaaagaatgaaattcctacactactaccttctccatcccaataataatgcatgcttaatgctgcatatgcattatgctttttccaaccatataaaactcttggctcgattccttcactatttttcatcatatcaaataatttatcagcgacttgaactggtttccaacctttatgagtaaaatctccaccaattacaaagcctttatgattcaaaccataaatagttgaatctacatagccaacagcttgatccatacctaactttgttaagcctggaagatatgctcttatttcattaatattttggctaattgtatcagaaaatctactaaattctctagtaccaggtatttgtgcttgttgtgctaaattagtcaattctgaactagtcttgaatgctggataacctttagatacacggtaattttgaatatcttgccataaacgatcttcaatttgttgaacctccgtatcagtaaagtatacatatacattcattttctttctagctaatttttctgattctgcagtcattggaccatctacaagtgaactcttcttagtgttatatcttacaccagaatcatcactattagtatttataccagatgacttagatgaagaactagatttcgaagtagtagatgatgtacttgtttttgcatgtacactattacttgttggaaattctcccttagtactggattttgtaaatccattattagtagtgctcgatgacccagtattataacttgaagttgaacttgtattagtagaagcaaactttactacgaaattagcagtacgaacatatttgttcttgccaatcttgtaatatttcttgcccttaatcgttttcctaccaaggatttttacaagtttgcctttctttaatactttcttaccaacacgtttaccctttgcattataaatataagcattctttgtcaacttctttttataggttgctgcttgtacaacggttggggtattttcaacattattattcactaatgccacagagctaacagataaaacagctgctgcacttaagctaaccaataatcttttcttcatttctagtatcctccaatatataatacgtggaaaatttattttcttttttctacctacattatataccgtttttatgacaaaagcagcagctaattacttagtaattttagtaattaaccctttaatcttattcttaaattcatcattagtcttatacaaataagtaccaattccaccagccattgcaactaaacttgcaataatccagcctgcatgttgcaagataaagtgacctgttcttggcaagaatccatttttacctgtaatagggttatttgatcctggattgtttgttcctggattatttggattattaggattctctgtgctattcgtaggattcttaggattgttgacgttgcttggtgacttcttatctgcttgtggtggaatgacattaactgtattagacttaacgtctttgccatttactgtcatatcagcagtgtttggtacttcaccattaaccttagaatccttctttaacttagcagtgatgttagctgtaaatttcttaccgcccatcttgcctactaaatcagccttaggcttccatgagaacttttcagtattcttatcaagcgtaagttcaccttggctagttacgtcattaccatcagcatcagtaatggttaccttttcaagatcaaggacatcttctaagtcgtccgcaaattcaacagatttaacatcttgtttatcaccgacagtgtattcaaccttgtagtcaaagtctttgccttcttgaaccttatctgattcaccccattgacctgattcagccttaacttgcttatttaccaagtttccatatgggtctggggtcttaccatctggtttagaaggatcgttaggcttatccttcttaggatcttcagggttctttggatcaccattaagcgtagtatgaacaacattagttggaatatcttgaccgttaatttgcatatgacctgtattaggaataccgctattgtcatagcttgatacatctgcattcggtttaatgttagaagcaattgcaacatatagtttcttacgtgagaacttagctggatcattagcagtccaagtaaagctttcatcctcatctgaagtaactaacttaccttcgttagttacattattaccatcactatcaatgatgacgacattctttaagtcaagcacattctccaaatcatcacttaatacaagtgatttcatattttgagaattaccaatatcaaacgtcaacagataatctacagcatcaccacgtgaagcttgattgctatctactgttgaagaattaataatttctttcaaatcttccttagaagttggagatttagtagtaacttcactagcgttttgtgatgaagacttaacaggattcttgtacggcgtttgaagaatttttacagcttcttcatattgcttgtctgttaccttatcgtttgccttgctccatacaccagtatttggatcgactttaacgtattcttgagccttttgatagtcctttggcaatgcaccatcatcataagagtcttgccctgaggaagtttcagacttgttgccaaagaatttcgtccaatctgcaggattcttaacaattcctttatgcgtcttaggttcctctacctttggggtcacaactggagtatttgatggggtgtctttaccattcgccttaaagtgagccgtatttggaatttcgatggtattgtttttaatatacttttgtaaatctgcattgtctttgactttagcagtaacttcaactgtatatttcttgccaggcataaccttaaccaagtcagcatttggttgccagttaaagctttcattcttttcatcaagcttaagtgtaccttgttcagtggtaatatctttaccatcggcattcttaacaactaccttttcaaggtcaaggacatcttctaacttatcggtaaactcaacatcggttaaatgttgcccttcacctgcagtatagtcaatcttataagtatagtccttgccaacctcaacattatctttatcttcatgataggaacctgatagtccctgaacacttttaactaccttattttcggctggaggtggagtttcaaccttaacaggatttgaaggaatatctttattgttgtacttcatatgagcaacattaggaatttcgtaattctttgttgctttattcaagtatccacttaaatctgcatcggtcttcagcttgacagtaatatctgcagtgtagatatgctttggcatttgagttagatattctttagaaggttgccaagtaaaactttctttatctttatcaagttttaaatccccttctttagtaacttcatttcccttgtcatcggtgatcttaacgtcttcaagatcaagaaccttttccaaatcgtcatagaaaacaacattactaatgtctttaccattttcaggaattgaatattgaactcgataatggaattcatcaccagcgtcatgcttggctttttcaccatattgaccgttcttatcctctacttgcttaattgcagtaggttcttcatcattcggtgtatgaacataaacaggtggggtcttgatcttttcatcgttatagatcatttgaccaacattaggaatgttgtattgattcgtattcttatccaaatacttgtctaagttagcattcttttgtaacgtggtttcaattcgcatgcttaacttcttacctacccaatcttgaggcttcttagccgtcatattggttgtatttgtacccttatcaaaatcagccgtaaattgatcagtaacatcagtgttaccatcaaaaactctggttttattatgagtaaacactggctccaatttatcgaaaagaaccaatttctttagatctacattgtatggaacttggtagtaaatatcaaaagcaatatctgatccctttttaaaagtagcatcactcacatatttcacatcagctgttgcatcagccttaacaatattagggtttgcattatggtttgcgactgctacacctacgcccacactacctagagttgctgttacacctaatgcagatagcaattctctagtttgcttttttgatagctttttcaaggctattcctccttaatttaacaaaaaaaacacctgcatttttgtcaatgtcacaaatcaaaacattgattcatatgtaggtgttttctaataatatataattattggcaattacttgtcttttgataattgcttgattttgatagaaaatggtttatttgtaccatcttctaaccatgcataatcaagttgtgcattttcactatcagcgagatcattagctttttctgtatcatagtgtaattcaatattattgtcatacaactctcttaagcaagcataaccaagaattgccaagaaataattcttatccttagtcttatcttcaaagacatctggatacaaacgactcattctttccattgcatcaatatattcactttccaacattacggtttgaaaagcataaggtctatctaccgctgtataaggagtatatgctacatatggaaaacgtccatcatacttgctagccaaaccttccgaatacttaaggaataaccagccagcccacagaattcgaactgaagccactcgattgtcttttctatctactagccatgcaggaaacctttctttaataattttatttgtatcagcaagcatagcttctggtaattcaaaatctacaaaaacttgttttgccataacattttcctttctaaaaatcaaaggagcctctaacatacttagaagctcccttataactttctgagccagtgtatttaccacgaataaaaagtctaccttgacctgtccagtcacaggtaaacaacgaaattactggcttcttcttaaactctttattattccaagctaatcttaaattataaactgaaataaagcgtgaagatgtaatcttgtaataataaactttcttataatctgttaataagattgttgttccattaggtagatttcctcttaccttcgcagtatataatgggctaaagaacgaacgcccatcatccatattatgacctgctaaagcgtaattgccttcacccatcctctgatattggttcattgttcctgcacctaagttcagttctacattaccaactccacgatagatatttaatagaacattatgatctcttattgctatttgtcctacagctcgataatctcttctatgctgatatgcattggcaagagattgaggtgatacaggttggacagccttcatattaaaacttggctttttcttctgtttgttttttctttgactcgacaaatgattagttgccacatagttagcagcttgtccttgaatatggtcaaaattagcaatgcagtaaatcgcaaccccaattaaaattaacgcaataatagctattactgtaccaatttttttctttttatcactttttcgctgttgattaatagctaatctacttttttttattttcattttaggaacaaaaaaaggcaattagcataactaattaacctttatttctaatttctacttagcagcttcccaagccttaatccattctggcgaataacttcccacaacggtaaagtttaattccaaaccgtgatcgatataatctccctcattattgaatctaacttttaaagcagcataagcatatttatctttatgtccttcaagtgttctcaagtctatgttgttgtcttcttttgtataagcattaaagatttcatctgcgactttcttgggatctctttcttttagattaatgaagtgctgtttcacattattatatctgaaggcatctaaatcattaagacttctcgcactatccattcctaacgcctttaatttaggtaaaaatttagctaaggtatcagtattttgaaatgtaccaataccatcacctaaatcgttatattcaggagtacctttttgcataattcgatttacaaagttattcaactctggatttgtcttgtaggcaggataacctttactttggcgataagcattgattttttgccataaataattttgaatttgggatacttggtcatcagtaaagtagatataacctttttctttgatccattcttgttttttagattgagaatttgagctattatgcttattgtcgtttgcagtactattcttagaattattagtctttttttctgctgttgcagaattgccagtagtattacctactgcagtattcgtagcattattgtttactgggttattagcaccttcagccgaagttgattgtgcattcgtagctttcacatattgaccattgcctaaggacaagtaatccttgccattaattgtcttaacaccaactacagtaaagacatggttcttctttaaagtatcagtgcccttgattcttttgccttcagcgttataaacataagcattgtgggttaaataatattgaccgctagccgtattagctttactggtcttcttagcaaaattagcaaccttaacgtattgattcttaccaatgcggtagtatttcttaccataaatcttctttgtaccgagaatcttaactgttttacccttcttcaatactttcttgccataacgattgccattactcttataaatataggcattatgagtaagcttgccattttttactgctgcttgtacaacatttgtattattagcaacaccatttatttcattaacacctactgctccaactgataacaatgttgcaacagataaacttactaatacattctttttcataaacataatttgctcctctttccttcaaataattcagcttaaattactcgctaacttttccccgctctcacctgctttcattatactacatacgcaacattatagcagcgggatatccgttaatttttattattttaaaatatactcttgcgtacatcttccaaaacgatcatatgtaaaagataacttcacttgatcattctttcgggaaagtaatgcacgtaatgctaatgtttctttttgccttaaaggtgtaaaatctttagggtattccctcgctaattgattgcgataacggacatactcatccgccgttaatcttgtaacatctaattttttcattacattaaccaatcgatcaacgtaatcaaaattattcataacttttcatcttaatttccctattattatagtttgtgatctctttttaattaccaacggttttacgctatgaccgataacgatgatggtttcttagttagccatcaaactgtaagtttttgtacagtacgtagcagatagcttcacctatctctaacctctcgcttcacgcattccgcaagctatcctcttatcaatcctaatcaaagactctttcttgcccttcagttactacaacacttaaataattaagtttattgactcacttactgttcttgatcacactccgactttttatttactcttgagtttttcatcaaggtattcacatgttaaaacagccaaaaagaatgtatgcttatcttttagtagcctattacagctattactattactttaaattttaaatttcgttcaaactaagacttatcatcaagccaaaaataatagtaatctttattgatggacggctatctccatctcggcaggtgtgattctttcttcttccacccgttgtgccttcaattctctgtcttacaaatcctattgagtcggctcaatagtcatgcacacgtcctacacccgttgcagagcatagttgacgcttattctgttttcaatgtactagtggactgtctaccagtcctaaaagaaatagctgagttgaacagctaaattattgatcaaaaatcaataattgtaccgactttcttaatgattaacattctaaggattttgcctcttttacttgatttgtcacgactactgccacaataattgctcctgtcacagctaacgcagttaaagcaaacttgctaaactttttcacgtttatcatctcctctgattttcgtttacccatttcttcaatgctgctttatcaatttttccttcttgatagcttctcaataatttcaaataattgcttctagcaacttctttttgtgtaattcgttgcagtagcttttcttgttgcttcttggctttcttaagccccctattaacggaaaaacttggtgggaagccctgatttcttgcgattgtttcattaacttctgttaactgttttcgcaaatcattaatttgactatcatacctaataaggagttctttaggattatcatccatatttttcttcaaatttttcatgtttgaatacgctcgccagacgtaataaacaatataaatacctactgcgactgttattaacttatacatattttttctcactagattagagcggaaagattcgaactttcattgcaagtattgagtattaaagtattaaaaatagggatatatatgaatatcaactttttgattcaaaagaggagcaactcctttaaccaatattcattccaacttgcattttacctattaaattatgccctagttttacattaaatagctccagtaatatccgataaataaaatcatgatccatagaataattccaagaatcgatagcagaactgtcactaattcatccaatttttcaaaaaagttagcaaaccttgtgcctgctaaacttggcaaagatgatattgccataagaataattatgaataaattccccgctccaaatgcgatcactatgtatcgaaaatgttctaatataaatgaactgatcataatatcttacttgctaacatcaattagcggctttttcctatgatgatcgggatattttcttttacacaataacctgcgatgtcctaatttaggatttacttcaaatccaaagcctaaataaatttgatcataaatctcatttactcgataaaaggttgtctctttatattttatatcggttttgtgatatttgagagataaaaaatattttgggtcttttataaatagtccatcaacattccagtaatggtacccgtctatcgtcagaatttcataaacttctttttcaactctgaatacgctaaagcgcctattttttactgacttccttgccatccaacactcgccaatcatactatccttaaaatggtaaatcagcatctgttaattgaacttctttttgattattaaaaggatcttccgctaatttatcttgcttatttgcttctacaatagttcgatcaacttctggctcttcatcttccatattattcatattttgtttatttgtattttgtgaagggctattggctatatcctcattttgactagttaagatatcaaatgaattgacccaaatatattcatacgctactctattaccatttttgtctacaaattttctaaccctttgttcacctgccaagattacttttgaccctttatgtgtattagctactaagttttcagcaactttattccaagcaattacatggtgccactcaccaacatagcctctttgaactttactataacggttttgacaaatagtaaaggttacatacttttttaaagattgagtagtttttaactctaaatcttttccgatgtaaccatccattacaacttgattaatcatatttctcgctcctctctcttctaaaatatttttgatatttatattatatatcgtttttgcgatatttcaagactaaaaataaaaaagatacagaatttttgttctatatccttaaactagctatcataactacatctaatttgctagaatagctttagtacgaaaaagttaaataagcggtggtactttcgttttcatggaggtggtgccaatggtgtattaactattgccctaaaatctattgaaaggaggtacagtttgccaaatgacaggctttttacagtctgtcatagccgtaatctatctgctttgtctactggtagtaagtctcatcttgcttaccaaaaaagtaacggagtggttcaaagccttaaaagatatgattgcagcatttcacgatttgtggaaaaagtagagcaaactaaaaagccgctcacaaacttttggcagagtttagcgactttttagttgtataatcaatgccaccgcccttttagcggcttcgtactaggagagctattagcagtagctctcttttttgttcactaatattatagcaactttacgctaaaaattaaaatatttcaacaacttattgggacacaaatgaccctaacattgcattcacacccaaaattggcaattgcaccgaactatattgggtgaagcttaattatttttgtcatgcttttgccttctttacttctttgctctgcttaatttttcttttaatccaagcaatacccatagttacacccttaattcctagaaaaattacgccaattactagtgcaattctccatacgccatccatcaatgttagtaaagctgggaaaattaaataaattccaaaaactacccaaacccatttccatagatgaaacgctgaagcaagaataaagacccaaaccataatccaaaaccaatctgtttgtgaaagtactaaaaacatgctgtcctcctaaatatacttagtaatcctcattatctttgtctgaatttgaggaacattgcttgtagtgtcaataacaacttgtaaatttgcttcaatttgatgaacatctttagctctaatcaactttatttgctcatggggcacagttgccttaattaacaatggttcacccttagcttcaaacgaatgttgcttatttgatagcaagcctaaggtaactgtcccttggctcagacttgaatttactactttaagcgaaacaaaacgataatctacaatctgtttatttcggctggtcattcttttaacatatttgtctttaagttccagatgtctaaacaacacttctagcccaattagacttgttagaaaataagataagcatgtactaagaaatattttcatagcttgctcctctcaatcactacaagccacttaccagctccaatatatttgattttttgatcagctctaatactaattagttgaccatttatttgttctacacagacatcaaaactattgctatctaccggtcttattccaagcacatcacgtctaaatcgccaagtaaagactttagctaattcagctggtgtagtcatcacaccagaccacaaatcaaacttattcattatcattctccagtacgtccttaatcaattggtttctaattaatgtttctttaagtaaaacgttaatttttaaaacataatctggataaagccgttgtttcaaaaccatagagctatttcccattaacccgaatacttcacccaccaaataattacttaattctaatttctgtttttcattaagctgttgtccattcaattcaaagttatctgacataccgagcagcataacggcaaaacaacctatcttcaatttgctgaatatcaatcttatcgttaagtaaatcttgtgcaacttttttatttcttggactcattttctactttcctcgttatctagttaatttcatttatatcaatatcttttagttttatacaaaggtatcgcaaaaatgatatattattaatgattcaatccgtattttttatttttagaggtaatattatgaaagataaacttaagcaatctgtcattgccataacaagtgctaacttaaaacggttattattcaatcaaaaattaactcaacgtgaactttcagcattaactggaatccccattccttcaattaatcgatattatttaggaaatggtgcaattccacaaaacaatctcattaagattgctaaagcgctgcacgttaatccaaatgaaattgacccttcatatcaaccaactcaagattttttagccaatttagcaaaaaaaactgatgatcctgaattaaactttcggatcgattctctcaagcaattaattcaagctagcaatttatctgttaaagaactagctgataagcttaatttaaagccgattacagtttataaatggttagcaggggtaaatacccctacccaggaaaacatagctaaactagcagctttatttaacgttagcgttgaatctttagcagatatctccaccaatttaaccccacaacagactaaaatactgaatgttttaccaactgatttaactgatcagcaaacggatttaatcatttcattaatcaaatctgtcttagaaaatgctaactaacttcatattcttctgtagtttcaaacacatttgaaatttcagcaattaatgctaattgacaattaatttgccattgccaccaattcaaaacatactctagttgattttctgattctaacgtcacaactgaactagctgatacttgcaattctgtgtcttgtagacttgttttaatctgaattgccacactatctgttgatgtcacggttttttgcttaatttttagatgactatcactaagtaattcacttaacttgttagtagattcacttaaattcaatgtccagctagcagggagtaagtcattaatggcgtaacctaactcgtctactttgaataaaaattcatcaaaattttcttttttacctgttaatttcattgtttttctccattttttctaaatctctaacgttctgctattttgtagagcgttttttattgcttttgatctagctagtgatctttgcattccaatcaatctcatgttgatgtttttgcatccactcacaggcttctttagcgaaaatgattgttgtcttgccttcaggagtctttctaggatttactacaaagccccctttcttgtaatcaacttctggaaactcatcaaatataaaagttctcacccagttatcgcctttaccacgacaacaaatttctctaaattgtttgatattccaagtttttccagttaaatcattcttgtcttctttgacagtttctttaacaatacttttaataaaattcgtaagacttggaatattgattagcgcattagtcatatcttcttgcatctttatccccagctttcataatttttgtcatttgctaaaccatctcttagcaatttgagtaaatatgcaaatggtttaccgaccatgtcccactccattcgctctttgaatttatccttcacagctcgtagagtgtcaacatcacattcatatagcaactttctcatttgcttaatttcatcaagagatggtctagttgtttgatttttgcgtttatcgtttattcttgcaataaagaaaaattctttgtagattttttctctttctggatcttcttctttcttcctagaagaagaattattaactgttctattagatgatctattaactctgttatatttatgtgacatgggtgacactgggggtgtgacattggtgtcactacccttgtgacgctcagttccccaccctagtgacatgtatgtcataagggctgaaccagcatgaatttttcttcctaaaattgcaccatttttatcactaacaactttttcacgctcaattaattttttcttttcaagcaaatccaaatatctattaacctgacgacctgatacttttaaatgttctgcgattttttggttactcataaaaaaattgccagtgacattaagcattgagataatttcacccattaaaagtatcgatttaggttttcttaataaatcttcatctcgtgaaattgatggtggaatcatcagaaatgctttagatcctttaaattcattttccatctgttatcctccctttactattcttattggttaagtgcttgattgttcagcgtattactattttgagtagttaaaagctctaaaaaaaatatcatctttgctaactccaaaataatcagcaattttttgcatcataggtggtcttggagtagatctacctgtttcccatgctgacaccgtaacttgcgttgtacctaaagcttgtgcgagatctgattgactcatgcctttttcaactcttaaaattttaagcttagttaacatttaatacctccccttaactacatttatatattatactattttaattagtatttcaagatagaaatcaaattaaaactatttttagtagtaattcactatttttattagtattagtagtaatataaatgtaaattaatagttaaggagcctagaaaatgaaagattatgatagaaagaaattagcaaataatatcaaaacacttagaaagcaaaagaatttaaatcaagcagaattaggtgaaattttacatgtttctcaacaaactattggatcttgggaaacaggtcgagcaattcctggatcagatacattaaaaatattagctgactattttcaagtaagtactgatgagttactcggaagaaaaacatctggttcagcaaatgacaccgatctaagtgaaatgattaataatgctagattcttcgatggcaaaccaatggacgaccacgataaagaattagtcagagatattctaaagagaatttacaatgaaaaataggaaaaggtgtgcattatggacactgaacttaaaaaaatacttaaggaatcacacataagattagaatttgctcctctacactgcccaggtttgcttgttcatggtaaagataataagcctgatgtgatgatagttaactcaagctatgatgatgagcaagctaaaaatgtaattctacatgaactgggacatatgatgtacgacaaggatgtgcaaggtgattatcaaagcgacgactgcgcacacacttgtagtgaacatagtgctaattcctttttaatacatgaaagagtcaaacaatactttgcgttaggtaatgatcttcaaaccgctaattggctaaattttgcccaaagtatcgggacaaaggattactttcaagtacaagaagaactaagtaaatataaatttgaagaatgagtctatgaccaaactaaatattactaactatcaaaaatacccgcctacttcactatagtagacggggcaatttatataagcagcatataagtaacttatacgtaatgcataaataacatatgaataatttaaatttaagaggtaaataagatggcgcattttgaaaaaagaggcactaaatggcgggcacaagtatcttggtatgatgagcaaggtaagcgttgttttaaagtaaaacaggggtttttaaccaaatctgcagccagaaaatgggctaatgaaatggaagttgcaaaagacgccaatcaaatatctaatcaagaccccatttttgctgattattttaaggactggtacgagacctataaaattcctggcaaatcaaacaacactcaaaatagatataaacacatttatgtattactacaacagaattttggtaaaaccagaatttcaaaaattactcgccgctcttaccaacattttatgaattcgtatggaaaaaagcatgttaaagatacggtctataagactaacggaacaatacgaacttgtgtaaaagacgcaatgagtgaaggattagttaaaattaattttactgagcgcattaatcttacatggaatgaggaacgttcaagaaaaattgaatatttaaactttaaagaggttcaaaaactaaaaaaatcacttttaaaagatattactccctcttatatcagtcgttatatgctactaacaataatttatactggaatgcgtccaggtgaaattaaggtgttaacatggcatgatatcgacttcaagaatcacactattagtatctctaaatcgtgggactatgataataataaaataatcaattatgattctgacgacataaataaagaaacgaaaaataagtcatctactagaatcatcaaggtagatcaaaatttattgaatattttagatcaactaaaggttaatcatcatgaacgactattcatcggaaaggatggaactattccttcatcaaatgctgtaaacaaagttcttagaaaacaactggcaaaaaataagattaaaaaagatggttttcattttcacagtttgaggcatactcatgtagcaatgttactatttaagggagttgacttatactcgataagtaaacgactaggacattcaaacatgagtattacagctaatacttacgcttatatgctagacgaattaaaacaacaatctgatcaacaaatagtaaacattttagatcaaatttaattaaatggataccttttagatacctctgcaaaacaaaaaccgctctagaacaacatctagaacggttatctatggagatgaggggaattgaacccctgtccaaacgcatctcgtcactgacctctacgatcatagttatattacttgaacttcactagctcaaaacgccatataacagggctagaatgggctagctaacctgttaagactctttttaactattcaggtgaggtagttaaacgtaactcgctaaagttgatactcggtgtcagccacgagtaaaccgacaaggagcaacacatgcgcttaaattaagcagctaatgcgtaagaatttttgttatttgcagttatatttaactgtaacgtttttacgtagtcgtaacctacgaaccgcagtcaatgcgggtctacgcctgtcgaatcccaaaacatccccttgagatacttattcattatagcatagacacacattacatgcgataaaaatgcttaatcaatattagtcaaacgtaccacatcacgttcaatcatcaattcttcattagttgggataaccattcctgcaactttggaatctgtttttgtgattagtccttcactaacactttcattagcttcattatctacaacaacacccatatatgcgaaagcgtcaagaaccgcttttctcacaccagtatcatgttcaccaataccagcagtaaagataattgcatcaacgccgcccatttcggcaatataagcaccaacgtagcgaataatacgattaatgaaaatttttcttgctaacttagcccgttcgctatcactttcacgcacatcgcgcatatctggtgaaattcctgacaagcccaacaaaccagacttattattcatgatataaatcatttcatccatcgacttatgctctaccttcattagatgttgcacgagtgaaggatcgatatcaccggttctagtagccattgtaattccggcaattggactaaagcccattgaggtatcgtaagacttgccatccttaactgcagtaattgatgcgcctgatcccaagtgacagatgactaactttaagtcttttaaatctttacctagtaatttagcagcacgcggtgctgtatagcgaattgaagtaccatgagcaccatatttacgtacaccatatttttcataatattcataaggaagtgaatacaaataatgtactggatcaagattacggtgataagtagtatcaaaaaccgcaacttctggcacatttggtaaaacattcataaaagcttcaattccgcgagcctcagcaggattgtgaagcggagcataatctgacaattcgtagatcttaggcagattttccttagtaataatagtagaatccttaaagtactctccaccattaacaacacgatgtcctacaccgacaatttcagttagttcttcaacaacatggtatccttttaaaaacttgatcaataagctaactgcagcttcttgatctgggatttcagttttttcaacgtgcttagtaccatcagctaacttaatctcaaatgatgaatcttcaagacctacacgatcagccattcctttggcaagaaccttttcatctggtaatgagaataatttgtacttaaaagatgaactaccagagttaattgccaaaacttttttcataaaaattaattcctcttctttcaaaaaaataagtgctttatcaattaatgattaatctttgcataccactcgttaagtttaacattaaattgaattaaagtctcttcttttttcaaggaaccaagtttggtaagcaaaacttcacttgctttggcctcatcaccgtgattttggaaaactaaaactgactttggattaaacttgttcttaaacatatcatctggcaactctacaatcgccttcaaatagactttcttagttaaccatggcataaaatcagcgccaatcttgcctgacaaaatagacttaggaactaccaaaaaggcatagccgttaggctttaaattattaataatttgttcgattaacaacaaatgagcaaaagaatgacctttcttagcctgattttcaaaattcttggcattctcatcaactggataatagcctacaggtaaatcacttacaattgcatcagcgttaggacacatccaaggcattaaagcgtcttgatgatataactcaatgtcaatattattcagatgcgcagccacatctgtcaaacttaacatatcttcatcgttatcaatccctaccaattgataattatccttagaatgattgagtgccttaagttgagaaataattgaaaacaacaaattccctgtacccacggcaggatcaacgatttccatcttttgatcttttaataatttatgcatcaacattgctactactgtagcaattgcaggtggagtaggcatttggttaacatcaaagccatcatcattaactgcctttaaagttagaaaagtaaagacttgagccttttctttttggctaatttcgtcataatctattgcttgatacttttgacttaattcagccactgttttttcatccggtgcaccattttcaaccttaatcttgccactttctaagttatcaaaagtctctactaaggcttctgtaaatgaaacatttaatgccgtttgcaaagtttgcacacagtctaaaaactgattaaaaagtttttccaaattttccatagcggtccctccataccttaattattttatagaaagggataaagaggtgcaaggaaagtcaatcatccgttaagcattcgataattaggcgattgttctccatgctagcatgataaatatcttgatacattttgataaacaaaagcgtggtcattaaaactaatacactacttagtaaggcactgccttttacgttatgcgtctttttctttggttttagcatttttcttttcctgttcctcatcaagctgaaaaactaaatctgatgcacccttatttttctctgttaccctaataatgatgctatctttagtggttttaaaagcagccttttcaacgttaaataataacggcatatagcctttccctgcaccagatactttaagtacgttctttttatagtattcaattcggtaagtagttgcatcgcctttttgatcgatgcacttaaaggaagcactattacttatagctaatttagttactggatacactgccttaattttgtcagcccgcataaaattttctagctgtacataagcataggctacttcattgacatgctgattttgattcaagtttgcttttttaacactcaacaataaattttgtaaaattagcagcaccatcatagtaataaaaagcgaaaacattgcttcagctaacataaaacctttactctttgaccgcaaaagtttgtttagtcgttgcatcccaaacatgattacgtcctgccttttgataaattcgatcgtgaactgttacttgctccaggtcagttttagtcagtatatggtaagcataagcacgatctgtttttaattccatctcacgaccatttttctgattttcagctacagttatataaaagcaactaacagcaatcacagcaattataattgctataaagctctcaattactagaaatcctttaacttttatcattccgctactctcccccacagcatttgatatttcaggcttttttccattccgtagccactaaaagtcaccgtacctggtttagaataaccagtcaggttgaatttaaaatgatccaagccagtaattttgatattttgatcaactggaatacttttgtgatattttccgccagagaataaaatttgattggatttagctagatatgatacgcaaatagtaacctccttgatcgtactgtacctcgaagtttgatcaagtgccgtcgtaactcttttaacagtattatcaaaaatcagtttttcttgatatctttttaactgcaaactaccaatcaacaaaatgccacagcaaacaccaagtgtaattattacttctagtagggaaaagccggctaatttatttcttttcaacgacttcgccactatctaacgtgaaattctttttagctttagtaatttgatcaccagttaagtaatcgtccttttttagatcttcaaaatctttaggttcaccatatttatccttatataactcaacttgcgtttgcacagtagtcctaaatgcatccgcagttttagtttcagcattcttcttttgattaatcaaattaggcacaattagcaaaatcaaaatcacgataatggcaattaccacaaccatttcaatcaaagtaaaaccctcttgcttgcggcgcttagccataatgtttgctaaatacttcttcatcttctctttcatttttaacttaatcctcttcttcactctatttttttacttttatctttaatgtcactttttctatagtccttgcatcattgaatacattggtaataacagcttcaaatacattccaataatgcataagccaattaaaataaaacaagctggttgaacattgacgactaatttctcaattttttcagttaaatccaaaaataggctacgtcctaataacaaacagcgcttactcaagctctttcgctcagagccagtctgcaataaaactaataaactattaggcaaaaaatcctctgcattaataatttcttctaaattttttccttcagctaaatcgtgccctatcttttgtcccagtgcttgctgcaatgaacctttctcttgatctgccgcatattcgcacattcgctgcaatgaaaagccactagctagcagcagtccaatgtcataaaccaacaaataatgaatatacagcataactacctgcccaattaacggatatttactcagttttttcattgatgaataatcctgtttattgagcaaagtaacgatcttagcaaaaaaatataagcccagcaatacaataatgatcagaccaatcatgaccatatctcctgaatgatcactgctatcgctgaattgtgtcgaaataaacgattgcataaagaccagtaaaatcaccatcattatcgctaaaaccaacggataagataattcagcccgcagttttttcatctgctcctgttttagtcgattcaacgttgctaaatgctgcaaacattcaactaggtttccttgctgtaaagccaaattaacctgagttactgtcgttttagaaaagcctagtttaagcagttcagtactaaaacttgctccttctttcatgcgactagccattctttccatcaactgacacctttttggccacaatgccggcattaattcaattgaattgagcaaagaaaaaccattatctaaactatgttttaaataatccaaaaaggccaattgttcttcgccatttaacttatcctttttggaattgccaatatacttcatgattaatttctcctcctttccacaaacgctctagattttcctgccaattaacgaattcaccacgaaccgatttgcctagctctttttttagcaaagaatctgctgcaatatccatcaagcactttaattttccttgactgactaataatcgctgatacgacactgcagttagacaatttgtcagttcgtcacacctaatacctaatccctctagtcgagaaatagtttgcaaagtacttttagcatgaactgtcgcaaaaaccaggtgtccacttaaagctgcatcaactgctaaacgtgctgttccttgatcacgaatttctccaataattaaaatatctggacgatgccgtaatgccgcctttaacaggttttggtaatcaattcccgcttcgttattgacttgtgcttgcaaaaaagaagactcatgaatttcaacaggatcctcgattgtcatcactactttgttttggctcattttcttagcaatttcatacattgtcgttgtcttgcccgagccagttggaccactagtaataatcaatccgcgactcttagccagcttttcaattgttcccagctgctctggaataaaatattgactatggtcaatcccatagatgactcgaataaccagtgactcttgatcggaaaaatctcctaagctagataaacgcaagaaatattcatgtccttcattctcatatgtcattgcgccaacctgcgggcgacgatgttctgcaatatccatctgagcactgtacttaaaaaaattgataatttcctttcccgtctccaaagtaaaacctgcatattcaattagacccttaccggtccgaaatttaaccatcaagttttcttttttcgggaaaaagaaaatatcacttgctttaactttaattgcctcaatcaataattcactgacaatttctttgatcttcataaaaatcctccttttttgcctcacattatttattacgcaaaaaaaatcgatttttttgtgagaaatttaaaaaaacacaaaaaattttctcaactctaaaaaacgttgatctaacagcatttcaagattaaaaaaccattaaaaaagtacacaaaaaaatagcttagccattggctaagctatttcatcattaactaattaatcttcatcagccgctgcagtataaacattttgaacatcgtcactatcttcaagagcatcaactaaatgttcaaattgttccttcttatctgctggaactggagtggtgttttgtggaatcatagttaattcagcatctgctagtttgtaaccatccttaattaaggcgtcacgtacacctgcaaattgctttggatcagtgtagatttcgtatgcatcatcactagtttgaagatcgtcaccaccagcatccataacatcaagtaatacttgatcttcatcagcatcagtagttgaacgatcaattacaatgtagcctttacggtcaaacatgtaagcaactgaaccagtagcaccaagtgaaccaccgttacgagtgaaagcaacacgaacgtccgaagctgtacggttcttgttatcagtcaaagcttcaacaaagactgcaacaccacctggagcataaccttcgtaagtaatttcgtcgtagtgttcttctgaaccaccttcggccttcttgatggcacgcttgatgttatccttaggcatgttgtttgaacgtgccttatcaattaccatacgtaatgtaggattcccatcaggatcaggaccaccactctttgcagccatataaatttcacgagataacttttggaaaattttacctctctttgcgtcttgcgcattcttgcggccttgaatattgtgccattttgaatgtcctgacataaggatccttctttcttttttctaatattaattaacgatattatcttaactcacagcacctcaaaattcaatggtgtcaaccatttaaacttgttttttctggtcaaaaaatctgtgtttaataaacaatactagcattatcagcaaaattgccgttaatgctcctgctccatcaagcattacatcatgcacgctcggtgttctatcacctgttaaaaattgatgatattcatcaaatacagcaaatgcaattgccataaaccaagttaaaactggtgctacccatttgattttgaaaattcttcttaatcctaaatagccaaaaccacctagtaaaaaataagaaccaaagtgagccattttacgtaaaacaaattgggccagccctgctcgaccatcaacttgcacattgtgaatacgaccaccgtaagtaaaatcccagccagcaacgatattctctaaccagccaaaataacggttaattttattgtcatgaatttcctgctgttgataagtcattgaactagaaatgaacaatgcaactagcaccaataaagcaagcagtaaaaagattttttctcgtttagtaaaatgaaatttatccattgctatttcttctctcttttttacttcttactttaacaaaaaacgggttaaacttgacccgttttataaattatttaactttgcttaatgcttcatcaattggtgtgtccccatcatgcataataattacttgatgaatcgtattatcatactttaggctatcaaccaatacctgagcaacatcatcaatcgaattttctccaccttctggagtaaatgatgtcttacccgttgctggcttctccattaagttacctggttgaatgatcgtataatccaaattagtattatgaattaaccattcatcagaaaagtacttagcaatatcataatcaataatgcttgcaagagaaggaatttctgcccacttgtcttggtcaagcgcaaaggcggagcttagttgaacgtaacgcttaacgccattagcttcagcagccttcatcagcttaactgcgccatttaagtcagtttgcaataagtcctttccacgagaacctgctacaaaaatcactgcatctgggtgacctaattcttcggtcagcttattaagcgaatcatgaaaatccaaatgttgcacccgcatattaggagaaataatttcaacagtattttctcttcttgcacctgcaattacttcatagccttcatctatcaatcttttgattacttctttgctcactctgcctgtagcaccagctacaaaaactttcattgtttttcctttctaccagctagccttcttaacacctggaagttgacccttatgagctaattcacgcatacattctcggcataagccaaacttccgataaactgaatgcggtcggccgcaacgttcacagcgcgtgtattgtctagttgaaaattttgtttcttttttgttacgaataatttgtgatgtttttgccataaatacctcttatctgcgtctatttattctttgaggcgctggctttcttttgctagttaatagtcccaacgccaaaataataattccaattgccaatacttgtccagtcattaacatccccacctttctttttgactcttactttttgttggtgtattatacatgcttacctataataagtaaagagatttgattgtaaatagaaagcgttttacactagtctgatacattccctgtcaagtagacagtagaattacataaagcttttattcctcagttgattaataatcagctgaggattttttggcttctcttattttcttttcgtgtattttttgccagtatttctcaattcgatgatttggtgcaatagggcaattcttaatattgcctttcatcgcttctttgcgcatttcaccagcagttaaaccgttaaaacgtttctgtggatcttcattaatgtagtaatctattgtcttacaaatagaatcattaagttcatcataactggccacttgaggatgaagaataactcgcatttctttgataatgccttgccagccttccattggaccattatcaatacagcagccaacacgagacattgattgcgtcatgccttggtcttctaattggttttggaaaggtgcgcgagtaaattgaaaaccacgatcactatggaaaagcggatgagcattagggtatgctttaacagcctgcttataggctgcttgaactaaagcagtatcgtttcgtttactaattgcgtagccaacaggatagcgatcatatagatcaaacacagtacatagatatgccttaggcaggttagcagcaacgacttcagtgatatctgtacaccatttttcattaggtctagatgcattaaagtctctttttaacttgttttcggccgttttctcaggcgttgtatgcttgaactttagcttctggtatctaggcttttgtgatctaatgccattgatacacatcaagcggtaaacagttttatgataaaccggcttttcatcagacatctgtcgattaactgccatggtcatcttttccgtcccaaacagactgttgttagacttagttatttcaatgatctttgcttcaatctttttgtctcgttcttcacgcttactcggcttgcgcttaggatcaaagtatttgtaataagctgagcgtgctattttagcccatttgcacattaaatcaatcttccaattgtacttttgatggcagtcatggattaactgatatgtttcttgtttccagcgtctttttattgcggcttgtctgtatcttggttgtccggcaagcacatcctttctaactgatctaatttttttaggaattcgttcttagtttgttcttctttgagctgacgctctaattccttaatttttcgattagccagttctaactcagttagctcttctggcttcttatgtctgcctcgtttatctgttaatcctgtttcaccattagctagatatttgtgtgtccagctgtaaacctgctggtaagaacaatcaaatttgacagctgtttgagtgtaattcttgtcgtgattaagacagtattgaacaatctgaattctttcttgctgggtagtttttcttcttgctttagtcatatagacctccggatggggatcatagtcccgattttctatatgactattatacttggaaacccattctgatactgttccattgcttctaatgccatatttattagctaaagaaggtaacgacattttgccagctaaatattcttgaacaaccttttctttaaatgccttagagtaatgattattgtattgagcattacttagaagggtatcacgattgctttgatattgatgaacccatcttcttacttgcatcgctccacttttacttggcatcttaagccgtttagctatttcaacgctgctcctattaccattcaagtattgttcaactgcccatatcttttgatcgaatgaatatttactttttctggacataaaaaatcccacctccatggataattgaatactttatgtatttaaatcgtccactttagtgggattgtatcagtcacagttctttttaataggtaaaatttatttgaatactttcatctaagaaaggaatagaatgaacgaaaaatgtaaaaataagtcgccaggattcttatctttttagggagtaattatttttaaatagagaaggatgagaattaattggacgatttaacatcaacaaataaaatgaaagccatcacttggcctgttttgaccttgatggcactttgtactgttatcggcttggacgatatcatgtacaacttccaaaaccaagggatgccagttatcacctcttggattatcatgtgtttgctttatgtaacaccttactcattaatggtaggacaattaggttctacgtttagtgaagaaggtggcggactttcatcatgggtccgcggtactgacggagaatttttaggttacttcactgcttggacatactgggcagcctcaattccttatgctgtagactccgctaacgaaatcattgtcgacctaggttgggcattgaccggttcaaagggattccaagataaaattcctactaccatgtttgctgctttgactttcgttgtgttcattgttttcattatcgttgaacaccactttgccaactcaatggaattcctttccagtattggtggtggtttgatggtcattatgactgtcttgtttgttttccttgcctttgttggtttggcaaaatcaggcggtcacatggctacccaaccatttacttggcacacaatcattcctaaattcgacttgcactactggtcaaccgtcggaatgttaatctatgccatgaatgggtgtgaactggttgcaccatatgtaactaagatgaagaaacctaagtcagacttccctaaggcaatgattactttagctatcatgactgctttcttaactatccttggttcatttgcacttggtatctactttgacgcataccacattccaaacgacttgaagatgaacggtgcttactacgtattcgacatggttggtaaacaattcggtatgggtaaattcttgctttacctctgggcttggacatcattattgttcaactgtgccttggttgccgtattgcttgatgccatgactagaatgcttatctccgacactggcgataagtacatgcctaagttcttacgtaagaaggacaaaaacggcttaccaattaacggttacatcttaactgttgccctttcatcattcatcatgatcttaggtatcttcttacctgacatgaacgatatcttcaactggttgcttaacttgaactcaatcatttcaccaggtgttacctgctggatcttctactcattcatgagagtaagaaagaactcaaagaagtacccatcaaaatatgtctacattaaaaacgataaacttgcttggcttgttggtcttgccttgttagttgttactgccgtagcaaccatccttggttttgcaccacaagatgttaagcaaggcagtggcctttggtggtacgaattgatcattaatattgtagccgtaattgtcttaattggtttgggtgcaattttacctggaattagacgtcgtgaagaagaatacggtattgcttttgacaaatctcaatggatttggatgggaattatcattatcggttctattattcttgacgtatggcttggtagtaccaagattccagcaagaatcacaatgattatagttgaagctatcgctgcattaatcattacttggattgttggacgaagaaaaccccaacaagcaaccatataaaaactaaattacaaaaaagctcgcaaataatgtcattaattatggcatgctttacgagcttcttttttgctcaaattgatatcactttcactctatattctataatcatatagtaatttacaattattttgtaattttatatactcaacaaggttagcactaagtgttatactaaagtataatggagataaggtatatatttatagaattatttaaactgagactgaataaaatgaaaaatataagaaagaagattatagtatttctgctagccttggaatgcttagctttttgtatatcctttaatagcaaagtgtatgcatcatggagtcccgcttcagaatggaaagaaaatggctatcctactgaggactggacaacagatcaatttacataccatcaaataggatttattaatgatcctaaaaataatcaattgttgttatatgtagacatttgccctgattctaaaaccaatagaaatagtcatggatatgaaggtggatatcgtcaattgcagccatcagcctacaatataaatgttggtaatgctacatacagtgttaatttagatgtcaatccatggaatattcaaaatggaaaatctggatatgcaggaattggagtatgggatcctcaaactaatcaatataaagcaactaaagataatctctgtcattattatgcagatagtgatggccgccaatcggccataattaagattccttacaatatgtttaacagagatgacctaaacggatcaactaaaatgacaatgcaaaatcctaatttgggtggcaacacaaaaatcacaatcagcggagccagcaccggcccatacatccctgccatcatcgcttttgtcttagcttcaatagccgcaattagttattaccataaaagaaagttagtacgtcatgaacatcagtaaaatatccccaaaaatatttcattttggaaatggtgtcatccgtgcctttttctttggcttgattataattagcttcttcgctgtgctctcatctactaattggctgccagatgcaaaaactacgaccggcttaacttacataatgtttgcactactattaattttagttttaagctggttctcctttccaaagtttcaaatgttcttaaaaacaatttttatcaagcataaatggattacttctattatttgtttagtccttgcattaatttggcaaattcaatttgtctacttcgtacatcccgcaatcggatttgatgttagtgctgttcacaataccataatcaatccgaatctacctgaattaagaggatatttcagtgttaactacaacaacctatccatcctccttactctaagacaagttgccaatatctttcattcaaccagttggttaacaatggctttatgttcaacacttgttacagatttaagtgttttagtaatcatcgctacaattgcgataatcaattttcaaaaaattcccaatatcatttatattctagctagtctgcttagcatattccctatttgcatggttccttacacagatgtatggtgcttgctccctatttcactttcaatttttggctggagcatcgctacccaaaaatcatatctagttgtcattcgttttttaggagcaattttatccggaattagcttagcatgtggcgtttggatcaagccttcagttgctgtttggggtattgccgcgattttaacgagtttactctatattttaaaaaacaacaaagtaattctaacttctattttctgtttaactattgcagcaagttttgttttagcctatcaacctcttaaaaaagcggttcaagatcagcattacatcatcgttaatcaaaaacgccaaattccgatgatccacttcatcaacgttggtttaacacatgatggtgcctatgatccaaaagcagctttaaaaatggatgagcttcctactaagaaacaaaaagttgtctattctaaaaagatgatcatcaagcgtcttaaaaaacgcggtccattgggttatttacaatttctagttaaaaagcaaggtctaaatactgcagatggtacattcggctggctgcatgaaggccattttattatttccaagcagccatcagaaggctggcgaggattcttagcggaatttatctatccaaatggaaaatatgttattgagtttagatttatcgctcaaattctttggacaattattatttttgtattgctattcagttttcaaaaaggcggctttattattcaaacgctaagaatggcactagttggcggttttatattcttacttctttttgaaggcggacgtagtcgttatctagttcaattcttacctattatcttgattttaacagcactttcagcagacactgctaaatataatttagataaaattttgacagcaattctaccgaaaagaggtttttaaatatgaatcttagtttaatttaccctactatctctttaccaatcattacaattagcatggttgtaactcaaacacaaatagaaaaagtatgggagaaacagctagaagactggcgtcaccatttatttatcatattgtgttttactactttttacatactccaaactgtttgtattgcaaatgtaaccatctttacctttaaagcaattgcttatatgtatgtcattccaacaattatggtattacgcaacaagcaacatatttggtggtttttgctttttatcacaccactaattccgttacttattggtcttgatttaaagagatattcatttataaatatccccgctactttattgcagatttcatccatcgcattaatctgctttattctaaatcattgtcaaaatctttcatatcaagttaagtatatcattgccctttattcagggagtctcatccattttgtacgtctttatatagaaaatgaattacacctcacatttttaatcgctttgacaatcggaactactttcaccatcattggtgaaagctggcgttattattttgaaagtcgacatgaagaagcaattgctaaattgcattacgaaagcaagcgtgatgaattaactggtcttcttaactttcgcgcttttgaccaagaaatgaaaaatttatctaaaagacctaatataactaatacctatattggcgctattgatatcgatcattttaaagtaatcaatgatacctatggtcacttaaatggtaatattgttctgcatactttttctaaaaaactgaaacacgagattgataaagcttttgctcctaattgtttcgtttaccgctttggcggtgacgaattttcaattgtcatttttaatgctaatcctgaacaaatcatcgctgcactaaacaatgttgaacaatatttccgcgataattttatcaaacttcctgataataaaactaaaataaagttctcgttttcatgtggcttcacgaagcatttatctaatgaacatttttataacactcttgaacgcgcagatgatttagtttacaaagtaaaaaataatggccgcggaaaaatattgactgattaaaaaactaaggaaatgaataatgcttaatggatatttaattggcgggattatagtttggttatatgccctttcagtaactaatcgtgcacatttatttgctttttattattgggttggtgctattggtgcttttcttttaactacttttgcatgccacaaatattttgtctggttcctagctagcctagtgagccgcggagctggtgtgattggacagctgactcatagctttactgcttatccgtttccagctgctttagacattcaaactacttttggatcaattaccctattagttgactatgaatgttctggaattattgaaacattggcatatttaagcttattaattttctttcctatttacactcgtcgtcaaaaggttgctcttagcattatcggtgttttttggatctactttattaatatttgccgattaggtttaattgggataaccgttcattaccttaatttgcgaaccctgttctgggttcacgacgttataggacgtatctttttctatatctttacaattcttctatattatcaagtcttcactcattcacaattagtctcaaacttactagggcgaagcaaattagattaaaaaggaataatcatgtttgatcaaacagtattacaaatgggattctgggctacttggcttttaattcctgtcatatttgaagaaattccgatgataattaattttattcggcttcttcatcatcataaaattcgcaaaaaaacccctctgccagattttttgccagtattatcaattattattccgacttataattcatccaaaacactttatagatgccttaaatcgctagctgattcagattatcccaaaaatttactaggaattttcgttgtcgataatggcagcaaagatgacacctttcaagtctttgctaaagctcaaacggactatccacaattattgatgcggtggcttacttctcctcatggaaagtcttctgcattaaatgctgccatttataaagcaagatcccaatatatcattaatatcgatagtgacggtcggttggataaacatgctttaaacaacattgttaaaaaattctcggctaatccaaatatcgatgctttaactggaacaattttaaatgaatattttgaatattgccaaacctttctagcaggaagaaatattgaaaataacagcaatcatattttcacgctttctggtgccttttcggcttttaaacgcgagaccttaattagaacgtatctttacagtaccgatacaattagtgaagatactgacatgactttccaaatccggtacaatttaaagggaacgatttcattttgtgatgatgcaattttttattctgaaccaattagcggcttcagtgaactatatactcagcgacaacgctggcaacgcggtgaactagaagtcattaacaaatatttatcgcaagttttatcttggaaacaattcttcagtaattttcaaattcgtcgtttaatcattgatcacacagtcactttcctaaaaataatttggatgtttgctatttttatattattaggatttggctattcatggatatcattattgttttcttatgcggtaatttatcttttatatttatttttggagatttcgagttcaatttgtgtttacatatacttaggaagctttccagaagaaagaaaattttatcttaaaaatatttggatgatttttttactgcttttttataatttactttgttctttcattcgttgtgttgggattattaatgcttcaaccaccactacaacttggcaaggaattaatataattcaagaaggtcaacaggttaaccaaatcataaaaaaagatataagacaattattgaaaagaaaaaattatgacgactaaatatcatacttatatattcacaacttatttgaacgcatcacatgctattcgttggagtaaaggaatcgggcaggctcattcccatacttatgaaataaggtatagctttcatattaataacggcaaattgattcgtttcaatgaaattgaaaataagattgctgaaattataaaaaagtttaataatcaatttttaaatgaagttgagccattcaccaaagtaaatcctactttagaaaatttaaccgattatctattcaatcgtttcggcgaagaattaaataaattgaattgtagtttagatgaaatatctgtaagtgaatcaccaatgagaacttatcagatttcaattaggtaacagaggtaatagtaatgagtaagtggtataacgtttttcaacctatttatcaagtcgataaagatttaaatgtaacaatttcacattatgaaatgttattacgagatgaaaatgattccttcccaaataacgatttcttcagagtaattggaactgaagaagaaaatcaaaaatggattttagccgaaaaagagtcaatagatcaagcttttgctaagtaccctgatatctgtatcaatttaaacattgagcctattcaattcgcatacccaagcgtttggaaatttattgaaaatatttatagtaagtatggtaaaaaagtggtcattgaagtaactgaacgtcaacttcaagctggaaccttaggtaataaacaatttgataaatctttccaaagattccatgatattggcttggacgttgttttagacgatgttgattctggtggtcatagctttacttttgtagatcaccattctgatataatcagtgggatcaaattatcattactagacttcgatcctattagttctgatactactattaaatttattgatgcttgggctagctttgctaaggaaaaacacttagatctagttgtagaagctatcagaaataaggaaattgctcaaaaatttgctggtaataaacatattttccagcaaggttattactggcaacagggagtaaaactagaagacttaccaacggtttatggatttaagaagtaattacaaaaagacagaattgattgcttaattctgtctttttttacatgtatttatttaaaaatttgtttattcgcattttatattcatgcggataagtttcgaatgaacgcgcatgagctgcacttttggcaatccataactccttaggaccatttgtagcatgatagttttgatacaccattttagttggcacaaaattatcttttccaccatggataaatagcattggcttagtattcttttttaattgcttaactgcagatgcatcccctaaataaaagccaagatttgctttacttacaccgcttaatagcgtaactgcacttgtagctactgcttgcggcataccgtataaatcttttgcttcatgcatgaattcagctttcacatcactatacccacagtcttcaatatatgccttaacttgcttaggcatcttgaggccactagtcatcattgttgttgctccgcccatactgacgccaaaaattacaatctgttgttttcttccttcaattgataaatctttattgacccattttctaacgtcatatttttcaggccaaccatagccaatatacttcccttgactttgtccatgagcacgcgcatcaggaatcaaaacattatatcccaattgatgaaacatcgccgcatagggtgccatggtatttttattattaccaaatccatgcagcaacacagcagtcttttcagaatgcttatttggaatataatttgcatctaagcggtagtttgaagaagcagacttaatataccaatgctcttttttagcgtttttataccactttttattctgcgcaagtgaatctttctttttcttgctagaatatttattcagcactgtcttttcacctggaacaaaagcaacattaaagaaatatgcttcaactgctccaattaaaacgattaaaactgtggcgactatccctattatccaccatacttttttgcgttttctattcaaaatgtcaactcctatataaaataatatagaattaattatacacttttgaattttatatggtatattgacattttaagtaaaatattgcctatacaaaaaatgatggcttacgccatcattttttgttattaatctaaatcttcaccgtgagattcaattaccttcttgtaccagtaaaatgaatccttaggcattctcttaagagtacctttaccttcatcatcacgatcaacatagataaaaccgtaacgcttagacatttgaccggtaccagctgatacttcatcaatacagccccaagtagtgtaggcacggacatcaacgccatcttcgatcgcacgattcattgccttaatgtgcattctaaggtaatcaatgcggtaatcgtcatgaatcttaccatcatcactaatcttatcaacggcacctagaccattttcaactaccatcattgggatttcgtaacggtcatacataacttcaaggtagtattgcaagccatctggatcagttgcccaaccccattctgaatacttaaggtatggattcttagcaccagcggcgaagttaccgccaaccttatcttttacttcatgagttgtgataacgttgctcatgtagtaagaaaaggtgtacatatcaactttaccttccaacatatccttcttatcttgctcagtaatgtctaagtgaacattgtgttctttccaaagacgcttagcaaatgttggatacttacccttgcattgtgcatccccacagtagaaaatattttgttcccacatatggcggttagtcaaaatatcctttggatctggggttaatgggtaatcaacgattccacaaatcatattccctaccacataatcaggatcaatttcatgagccaacttaactgcccgagcactagctacgaattgatagtgcaatttctgatatgcatgttggtatgccttatcatcagtcacattattgccaaaagcactaagcatcaacagggttgaattgatttcgttaaaagtaagccagtacttaactaatcccttgtattcttcaaacaaagtcttagcatatttcacatacatatcgatcattttacgatcttgccagtcatgatatttttcactgaggtaaagtggatcttcatagtgagaaatagtaactaaaggttcaatatcatattttttacattcttcaaatactctgcgataaaagtcaagtccagcttgatttggcttttcctcatcacccttagggaagatccgagtccaagcaattgataaacggaaggttttgaaacccatgtccgcaaacatcttaatatcatctttgtaatggtgataaaaatcaatcgctacatggttaggataatattcattaggatcaattgcaccaactgccccttcaggaagtcccgcacctggaactcctggtgttttttctaacttaccatttaacttgtaagtcaacattctaggtgcatctaagctacctgcagtagtaatatctgttactgataggcctttaccatcttcatcatatgcaccttcgatttggttagcggcagttgctccgccccataaaaagttctttggaaatgacattatgattctccttttctgaaagcatttacattaattatagactaattggtttgaacttgaccagttgttttaacttctgcgttactgccttgcaaagacaaaatttcttgaccaactttaacttcaccttgagctacttgctgtacagattcatatttcttagaattcgtaacaacaactggagtagtcacttcatagccagcagccttaatttctttaatattaaatttaaccaatggatcacctgctttaacctcttgacctttttctactaaagtcttgaagcccttaccttgcagattaacggtatccattccaatgtgcattaacacttctgcgccatctgtagtgttaagtccgacagcgtgtcctgttgggaaaactaaagcaatcttaccatcagctggggcatgaagcacaccttcgcttggttcaatagcaacgccttcccccattgcaccgcttgagaatacttcatctttaatttctgacaatggttttacttcaccgtctaatggtgaaactaatttggttgaaggattttccttttcttcacttaaaattgcttgtacaggagcactcttagtaatattagctgcttcattagcggcgtcagcaactttttgtgcttgttttttattatattcagcatcaactgattttttaccaaagagcatttgaagtgcaaaaccagctataaatgctacaataccggcaataattacgccgacaattgttgtcattgatcctcccttaggattaatgtaggccggaattgcaaagaatcccattgatggcataatgtacaatactgaatgaaaggcaccaatgattgcacctgagactgcaccagcaatacagcttaaaacaaatggcgtttttcttggtaatgtaataccataaattgctggttcagtaacaccgaacagtcctgagaaaaatgcaccagtagctgtttctttaagttttttgtccttagtttgacggataatagctaaaacaacaccaatttgcgcataacaaaccatgcaggataaacctagaattgggtcataacctaatgcggctaaatctgcagtagttacggcaacgattccccagtgaacaccgaaaataacaagtacttgccaaagagcacccattaataaaccagcaataattggactaaagttgtaaacacctgacatcactgcaccaattgcgtccccaacccaagtcattacaggaccaattactataaatgcaactggtaaagcaataatcatagtgacaactggaaccaagaacatttgcacaactgatggaatccactttttagcccagtgctcaataattgaagcaaaccaaacggtaaataatactggtaaaactgtagaagtataattcatcgtgataaccggaatgccaaagaaagtcgtgtgaatctctgaggcaaaagccgttcctttaaacaatgtacctagaacagtcttacttgcagctaattgaaccatagttggataagttaaggttgcaccaattgctaatccgataaattgattcatgtgaaatctacgtgctgcagttacccctaagaatactggtaagaagtagaaaatactatcaccaattgcatatagaatttggtaagtacccgatttagtagaaagccatcccattgcgcctactaaaactactaggcctttaataataccgccagcactaagtggagctagaatatctgtaaaaatgcctgaaatcaaagcaacggctttatccacaaagctagaattatcttcaacgtcatcatcaggaacttgtccaccgccattaaagccgccttctttgacaacagcatcgtaaacatcagcaacttcattaccaatgaccacttgatactgaccaccagctttaacaacagttacaacaccatctgtatcttttaaaacatcatcgttagcctttttttcatcctttaatttaaaacgcaaacgagttgcacagtgaacaacactggtcacattatctttgccaccaacattttgaatgatggtcttggctaattcatcatagttcttagccatttgcctttcctccttaaaataaaaacccaagctactcaaaaactaaagaacataaatgttcaacgtctttcagtaactcgggttcatgcctaatcttcttagtaacatacctaagtaacttagatatttaattatcttgacgactagttacgcgccaaatatgtaaaacaagataaaattcatcatctgaatctaaatcccatcccatttttgcatgtaagtaagtggtgatccgctccgccgtctcatacgctttgctatatttgattttcataaaacctagcattgcaggatcaagtgaagcctcctccttttgcttatttcgtaaaaatctaactaacaaaatgcgcaaatgcgaaacaaacctactatagttaaaggagctcgtatcaagttgcattgaatattgcaattgaataatatcgattatcccacgaatcaaatttgtaatctgaattgtttcttgtacttgagaaacatcactcttagcattaaccaggtgataggtcatcaaaaccgactcactctgcggcaatttaatctgcatctcctgattaattagattgaccacttttttagctgccgcaaattcttttggaaaaagattttgaacttcccaactattgttagcgggagctatatcaatatgatctttaattcgcgtaactgcaaaatcaatgtgatctgctaaagcaagatactgaaagtcattgaacttaatctgaagcagaggttcgaccagctgaagtaccttattagttacttcaattgttttagggtcaaagcccttaacttgatccacttcgtctttagtaacgaagcgacgttcaattttgctttcatcaacaggatcacttttttttagaccaaatcctacgcccttgcctaggactatttcttcttgaccttggttattttcaattaaggcagcactattattaaatgttttaagaaatttcataataattcaccaccttagcaaaaaaagaaaaagctatcacaaataatgatataccaacgcaacattatttgtaatagctaagacctgatcgtatcagtaatccgctcacttacagttattataatagccaacattgtaagcggtgtcaatataattttgtgaaaaaatgcaaaatattttacaatgaactaaaaagcgaggtaattaaaatgaaattcgttcttgcacctgattcatttaaagaaagcatgacagcaaaagaagtctgcattgcaatgaaaaatggtattcaaaaagttattcccaatgcacaaataaccgcagtaccaatggctgatggcggcgaaggtacaactgattcattggttgacgctacaggcgggcaaaaataccaaataaatgttaccggtccgcttaatcaaaaagtatcagcttattatggcatctcaggtgatggacaaactgcaatcatcgaaatggcacaagctagtggtctctcttatgttgcaaaaagtaaacgaactcccgaaacaattttaaagactacaacttatggaaccggcgaattaattaacgcagctttgaagcaccacgttaaaaagattatcatcggcctgggcggaagcagcacaaatgatggcggtgctggtatggcacaagcacttggtgttaaattttttgatcaaaatcatcatgaaatcacccaaaagctagcaggcggtgctttagatcaaattgtcaatattgatctttcttcaattaatcctcgtattaaagatacccaatttttattagccagtgacgtaaccaatcctctaactggacctaatggtgcaagtagcgtcttcggcccacaaaaaggcgcagatgatacaactgttaaaattctagatcaaaatttatctcactatgcacaagtaattgagcagactattgataaaaacgtcgcccaaatttctggtagtggtgctgctggcggcctaggcgctggcctgatcgcctttactaacgccagtattcatccaggcgtgcaattaattgcccaagaaactaagcttgaagccaagatcaaagacgctgactatgtttttaccggcgaaggcggaactgattttcaaactaagtttggtaaaacaccctttggtgttgctaaaattgctaaaaaatatcacattcctgttatttctttagcaggctatttagatcaaggtattgatcaactctatgatgaaggatttaccgctatatttggcattcttgctaaagcagaagatattgagcaagccctaaaagatggaccaataaatgttacccgtacaactgaaaatattgttcgtttaatcgcacaaaaataagatgagctcgatgcccatcttattttatttcgttaatttcttaattaagccttcacagccacgataaatttcattatacgctgtttcaaaatcatttgtataccaaggatcatcgacatcagcataagagccagcaaactctaaaattttatgttctttatgctctgggtctccaccagtaatgcgattcatatctgcgaaattttcttcatccatgcagattaaatattcataattatcatagtctgagcgagtcatttgactagcacgatgaccacgatcatatggaatatgttttgcaactaattcccgttgtgcacgagcatcaatcccatgacctaaagcatcctgcgtagttgctttagattcagcagtatattgatctgctaggttattttcttttaacaaatattgcatcacggcctctgccattggtgagcggcaaatattgccatgacaaacaaacagaatttttttcattaccttttcttcctcttagttagtctatttataaccggccaaataatcgccgtaataactccaactgttaagccaacccaaatctcctgcgacaaagttacaagaatgccactataaactcgactttgcaatgcggtcatcgcctcatttgaggcaagccacaatgccacaaatgaagcaatagtagctagtgctagtggaattgacgccgaagagcgaccaaataaaatcaaaattgcggctaacaaaaataacaaagccactgcaaaaattgaatactcataaattgtaataatatggttcacatcttctgaatcttccttcaatttatgattaatttgcttgactaaatattcattgataatttcttccaacttacttttactagttaagcctaaatctttagtggtcaattttccctgatcattatatttttcacacaatctatatagatcagcatatgataagttaacttgatatttcggcggcaattgttctaacaatgtcttttccaaaccagatgcttcgagtaactcaacccctgccttcaaattaggattatctgagtcatccactactcgattgattacttctttgcccatcgcctgtgtatcgtttatttttaaattcacattgctagtcattaataaccaaaaagatactgcggctaggccgaccattatcaaacgtagtattattttgacgatgttcttcatctaaaaatcttcccctaacatctacttttttcagatggcaaacaattgcaaggcaccatgtcaggagcatccttttctttcaatttaagttcttgctgcatcgtcttaatatcgcccttagaaagcggtgcttcttttagcaactgaattaatacctcacccttgtgcatatcacacatgttttgcatcatatgtaaagtaacttcagacatcattttgcgctgactaatagtcggcttataaacaaaacaccggccttctttacgcgtctttagcaagcccttttgcactaaacgccgcattagcgttttaattgtggaatcggaccaatcctttttaccttgtagttctttgattacttggccagtacgaacttctcctaaggtccaaataatacgcataacttcccattctgattgggtaatggaattacgatcgtctttagtttctgccataaaacatcacttctaaatccaaattttttactaaagaacaaattttttcaaagcctttgcaatcccgttgtgatcattatcatcagtaacataatcagccttatctttgatctcactaatggcgttacccatcgctactttcatgaagttgggattagaaaacatcgaaagatcattgccttgatcaccaaaaatcatcacgtctttttgggcaatttttagccgtgaagccaaatccattaaagcattaccttttgaagctcccaaggcatttaattcaataatactgtcaaaactgcgaacaatgtcataagtctgaaaagcccagtcggggaaactattccacagtttttctacctggtcagctccttcagttgaagtaaaaccgactttgttaaaagtaaaatcttttggaatttcttttcggtctctaactttcataatattatcggtcaaagccgcattaatttgcatttgcacagataaatcccgatcagttgtaatgaaatacttagtcgtctcaaaatgtacatttacatgacttaaacgctgaaaacgcaacatattattgaagtcttgataattcaattcctgactcattaaaacacgaccagaaattgtttgaattactgcaccattaaagacgattgcatattgatcatcaccttcaattcctaattgcttagcaaagttcaatactcctgataatggtcgtccagtagctaaaacaaccttaatcccattttgtactgcgacacgcaacattctttgcgtttctggcaaaatagtattattgcttgataataaagttccatctaaatcaaccgcgatcaatttaatagccattttaatccctcggatcttaaaaattacatctagcattaattatacaaaaagccgtgatttaactcacgactttttacttatcgattattcaattaggattttacttacccatttccttttcgaccactttaacgatacggtctacataggcatcagtttcttcttgagttggtccttcagccattactctaagcaagtcttgagtacctgatggacgaacaagtacacgaccatttccagccatatccttttccactgcagcaatttcatcaagaattggttggtgttctttccagctcttcttgtcagcaaccggaacattaactaggcattgtgggtaatctttaaagtctttcaaaagttcacttaatgacttaccagtcttcttcattacgagcattaaatgcaaaccggttaacataccatcaccagtattatgataatcactcataataacgtgacctgattgttcgccacctagattgtagccgtgagcacgcatttcttcagaaacgtaacggtcaccaacttgggtacgaacattcttcaagccttctttttcaagagccttagtaaaaccaagattactcattacagtagtaacaatggtatctttcttcaaacgaccatgttctgccaagtatgagccgagtacgtacatgatgtggtcaccatcaacttcattaccattttcatcaacagcaatgcaacggtcagcatccccatcaaaggctaaaccaagttgagcaccttgcttaacaacttcttcttgtaacttttcagtatgcgttgcaccaacatgatcgttaatgttcaaaccatctgggtgagttgcaatagtagtaaagtcaacgccacaatcagcaaacagtcttgagatcaatgcgcttgaagcaccgttagctccatcaataactaccttaattccacccaagtcttctggaatagtattttcaataaattgcaagtatttagctgaaccttcgtggaagtcagttacagtacctaatcccttagcagatggacgaggtaatttatcttccttagcgtcaattaatttttcaatttcgccttccatttcatctgaaagcttcaaaccatcgctaccaaagaacttaatcccattatcttctacagggttgtgtgaagctgaaatttgcacccctgcatcggcgccttgtgctcgtactaagtatgaaagacctggagtagtaattacgccaacctcaagcacttcaatcccaactgaaagaaggcctgaaatcaaggcatattcaagcatttggcctgaaatacgagtatcacgagatactaataccttagcttgttcgccgtcttttttgttcttagttaaaacataaccaccatcacgacctaatttaaaagccatttctggagttaagccttgattagctacgccacgaacaccatcagttccgaaatattttaacatttaataaacaacctttctcaaattaattattcgcattctttactttaattgatatctgtacattttcaggatcaacgcgagcaactcccttaggtaaaactaaagggtaattctttacagttgaatatgagattcctttcagatctacatcaacatccaactgcttaatctttgctaatgtttccttttgtccatacagtgttacctcatcattcttggcagtaaccgaatagactttattatttttttcatttttaggctttaaatttagcttaactttctttttgaaaagcgatattggcaaactagcttttactgtagatggattaatcactgcatttaattgacgcccttttttatcttcagctatcaaaataacttgacgctcataatcatgattaatgccattaggtaaaggcaacttggcaacgatctgatcaatctgatttacttcgcttctagcaccagtaacctcaacttgctgcggatcaacactagccgtaccaatattatatccattagcaacagcatttttattatactctatttgaacgggcatggtacgagattttcgccgttcaatatcaacattaactgttgccgggttaatcgtgtaagataattgactatttagtcccgtaacttctacctttacggtttgcttacctattttcttatgagttagatcaatataagcacggaagctttgagtattaacagtcgaagtaaccaacgcattcgaaccctccaaagttatcttaaccttttcaggataaccaacaacatagtatttatctgtattaaccgaaacttgcagaggaacactaattgtctgcgtttcattagcagtttgccgtgtcttcttagattcaccctgtgtaacaaaacctgtttgagtagagtcaatgtaaaccactaataagatcgcaaacagcaatgagattattctgattacccagcgtttatcccaaaagtctttcatcgatctgcaccccatttccagactttattaatcacacgacgaatccatggaaccttcttctcttccttaggaacaagttgagcattcaaatacttcaaatattcttcacgagacaaatctactaaaaagcgcccgtttctagtaatagttacgccaccagtttcctctgagacgacgatcgttaccgcatcggtaacttcagaaataccaacggcagctctgtgacgcgtgcctaaacgcttaggaatcatgctgttatctgacagtggtaaatatgctgctgcaacagcaattcgattattattgataattaccgcaccatcgtgcaacggcgtattagggataaaaatattaattaataattcaccagaaatatccgcatccagcttgattccagtttcaatataatcatctagccccgtatcttgttgaatcgtgattaaggcaccaattcttcttttagacatgtattgaatcgctttatcgagctcctgcaccatcttaaccgactgtgtatgagcactctcacctcggccattaaaaatcggcgtgcgtcctagccgctctagtccacgacgaatttccggctggaaaataacgataattccgattactgcccaagaaacaatttggtccacaatataagttaccgcatgcagttgcagtaagccggcaataattctaacaataaagataaagacgatcccttttgccagttgtactgctttggtaccacgaatcatcatgatcaaacggtaaactaaataccaaatgattaaaatatctaaagcaatggagaaattattccaagtaaacagattagaaatattaaaatgcattgattgctcctttcttctttaattataaccgccccaatttaccgtgcatacattttaaattctaaaaataggtcattatattcttgggtcttcttaggacctaaatctctaaagacctgtagattcttcaacgtactttgagtaggataaaactgccggtcatctctaacttttttcggcaataatttttgggctgcggtatttggggttgcatatccaacatattccgcattttgcgctgcatttttaggttcaagcataaaattaataaacttaagtgcagcttttttattttgtacagttttaggaataacaaaattatcaaaccacaaatttgatccttgcttaggcacaacataatgcaagtgaggattttgttccatcatttcataagcctcaccagaccaggtaacgccaattgctgcctcattttgcactaggtacatcttcatttcatctgaaataatcgccttaatattgggtcccagactattaagcttagtttgtgccaaatgtagtttaatactagatgtggtattcattgaatatcctaaagaaaccaatgccatccccattgcatccctagctgaatcaactagtaaaatttgcctgcgatactttttactccacaggtcattccaagtcttaattgcccctggcttgacgaatttatcattataaacaattcctagtgtcccccagaaatatggcacagaataatcattattttgatcaaatgacttatgtaaaaaactcttgccaatatatttcaaattaggaatttgcttttgatccaactgatcaagcaaatgagccttgcgcattttagttaccatatactcagaaggaatggtcaaatcatatgccgttccgccttgtttgattttggtatacatcgcttcattggaatcaaaggtctcatagacaacatgataacctgtctgcttttcaaacttttttattaactttggatctagatagtcgccccagttatagataatcaagttttgtttatttttcccggtagacgatttctccaaatgatgggataaaccccaaaggcctgcacaggcaattaaaatagctgcaattgccatcataatctttttcatttaactaggcctcccatcacacgatgatttttctttctgccctttttagtagtaataaaataatagattcctacaagcaacaagacaaaaatgaacattacggtacttaaagcattaatctcaagatcgattccttgtcgtgcccgagaataaatttcaactgaaagagttgaaaaaccattcccagtaacgaaaaaagttacggcaaaatcatctagtgaataggtcaacgccataaataaaccggaaaagatgcctggcataataactggaattaaaacatcactaaaaacctgccatgaattcgcccctaaatcacgtgctgcatcaataagcgacatatccatttcattaagtcgcggcaagaccatcaaaaccacaatcggaatagaaaaggcaatatgacttaacaatacagaaccaaaatttaagccaattcccaatgctgtaaaaaagatcaaaaaactagcaccaataattacatcaggtgacaccatcaagacattgtttaatgctaaggttgttttcttattagattcttttttcatcgcagcaattgcaattgcaccaaatgtcccaataattgttgctattaaactggacaacagcgctagtaggatagtttccaaaaatatcgctaataagcgattatcttgaaataaagtctgataatgagcccatgtaaagtgctcaaatttattcatgtttttaccactagaaaatgaaaagtaaatcaaataaaaaatgggtacatataataggatcaaagtaaaagcaagatagatcttagcgattaaatgtctgtttctcataaatctaccttctttcttctagcctttttgctagtaatcaacatgactaccaccatcagcgcgattaaaattactccaattgtggcccccatattccagttcattgtggtcataaaatactcttcgatagcagtccctaatgtgattacccgattgccgccgatcagccttgttaacataaataatgacaatgatgggataaagatggcctgaacgccgctttcaactcctggacgagaaagcggccataaaacatagcgaaaagtttgccatttactagcacccaaatcctcagaggcatgaatgactgcaggattaatctctttaatcgcattaaaaattggcaaaatcataaacggaatttcaatgtaagtcgccacaaaaataaaagcaaaatcagtaaacaaaatatttacgggaccaataccaaataaatgtaaaaatttatttactaaaccgtcattacctaaaatgccaataaatgcatatgctttaagcagcaaattaatccatgttggcaaaatgatcaataacagccacagctgctggtttttcattttaattaaaaaatacgctgccggatacgaaattaccaacgtcaacaaggtgatcaaaaatgcataccaaaatgagttaagcatcatttttaaaaaggtaccatttttaaaaaattcaacgtaatttctgagcgtgaatgcgttattactatcagtaaacgaataccagagaatcaataaaatcggcaaaatgacaaagagaataatccacagcagatatggaatcataaaaaacatctttttatttttcattttcatccgcctcatacttttctagtcgagcatcaaaatcgtgttggctttcatttaaccgcatgacgtgaatatcttctggatcaaaaaagagcccaacacgttgtcccaatttaactccattagtagaatggatcagccattcattttcattggcatcaattgccttaatctcaaagtgatcacctaaaaataattgcgtctgtgctgtaaccacaatcttcccatcttctggtttaacaatatccaagtcttcgggacgaataactacttcaaccttttcattaggcttcatcccaccatcggcacatttaaatttattattagcaaattccacttcgtaatcatgaatcattcgaccagataaaatattggagtcaccaataaaacgtgctacaaagtcattcactggctcatcgtaaattgctaccggattaccactttgttgaatctgcccatcatttaaaacaaaaatttcatcactcattgatagagcttcttcttgatcgtgcgtaacaaaaataaaggtaatgcctagctttttctgaattgcccgtaattcaaattgcatgtcttttcgtaaacgtttatccaaagcagatagcgactcatctaatagtaaaaccttaggttcattaacaattgcccgggcaatagctacacgctgctgctgtcctccactaagttccgaaatttcgcggttagcgtaaccgtctagacgaaccatatgcaaagcatctttaacagctggcttgatttcactcattggtcttttcttaattttcaagccaaacgccacattttgaaaaacatccaggtgtggaaacaaagcataattttgaaaaactgtattgatatgtctttttgaagcatcaaggtcagtaatatcattaccatcaaagaggacttgaccactagatggctgagtaaagccagcaataattcgcaaaattgtcgattttcccgagccactaggaccaagtagtgaataaaatttaccagattcaatagttaaatttatatcttttaatgctacaaacccatcatcatattttttggtgatgtgttttagtttgataatatccatttccatccctcacataaaaaacagctgcaagccttccagcctgtagcttgtctttgctaaaatattttacttttctttgccgataatcctaacttctgtgcgtaagtcaatgtcaaacttttctttaattaccttttggatcaaatgaattaaattcaaataatctgttgcagtagcaccgcctttattcacgataaaacctgcatgtttcattgaatcttgagcgccaccgatttgtttaccttgtaaaccagctttaataatcatcggaccaacaaagtgcccagtaggccgcttaaagacactgccacaagatggatattcaagtggctgcttataacgacgtaaagcatttaaataatgcatatgatctaagatctctaacttatcgcctgacttgagtgcaaaagtggcgcttaatacaatatcgccattttcttgaactaatgaatgccggtaagaaaagttcatttctgcgtttgaatatgttttaaattctcctgctctggttaaaacattaacgctttgcactacttcttgcatctcaccgccataggcaccagcattcataaaaataccaccgccaatactaccaggaattccagcagcaaattccattccgctcaaaccatgatgagcagccgcaaaagctgtatcgataatccgtgcaccagcatcagctgtaacttgattatcttctactttaatctcttttaattcagtcaaaataattactaacccatcaattccgccgtcacggatgattaaatttgaggcattgccaataattgttaatggaatttcattttcacgtgtgacttttactaattgttctacttcatcagtcgtcttaggaaaggccaaatattcagctggtccacctgtcttagtaaaagtatatctgcttaatgggatttgctctttaatatcaatccctttttctttcaaatcaagtaattccacgctgttgcctccttaaagtttcttgttttattttaccgcataaaggcgttagcttcattaatattaatgatatacttttttaaaaggagaattttatgaattttattgcaatggactttgaaacagccaaccattatccagaaagtgcctgttcacttgctttggtaatggtgagaaataataaaattgttgatcgcttttatacagtaattaatcctcaaatgccatttgacgcgcgaaatattcaagtacatcaaattacagctgaggacgttaaaaacgctccaacaatggcagaggtctggccccacattaaagaattgtatcaaccaggaatgcttgtagccgcacataacgctcgctttgatactaatgtcatgcggcaaagcctggcacgttacggtattgaggagccccactatttggtcattgacactttagctagcagtaaattactcgaaccagaactgcctgaccacaaattagacacagtttctgaggccttaaacgttgaattgtggcaccaccataacgcattaagtgatagtgaagcatgtgctgggattttaatcaagcaagaagagcaatttggtgatgaagcaatcaaaaatttggtttatcagatatgaaaaatctctaggaattttgatcctagagatttttgctttacttattaaattcagttaacgcagctttgacccattcttcattgcgcttaccatgaggagtaaattcaacaacccgtttagttgaatcccaactatcgtccactctggtaatcgtaagttgcaaatactcatctggcaaatcattcattactagttgtggccattcaattaccactaaacctggttctgctaaatagccctccaaatcaatcgaggataaatcatcattttccaaacgataaaagtccatatgaaagagcggcaacttagcttctcgatattcacgcacaatggtgaatgtaggactcttaacaggccgatgtatgcctaatgctcgccctaatccttgagtcatggttgtcttgcctgcacccaaatcaccatttaatagtaataaatcgtagggctgggccgttttggctagggatgcacctaatttctgcattccatcagcagaattaatttctaactttgtcattacttttcatcctttgctaaagcttgtgcggcagtaacaattgctaaatcataaatatcttgttcactgcagcctcgagataggtcattcactggagctgctaaaccttgcaaaattggaccaacagcagtgaagccacctaatctttgaaccatcttataaccgatattgcctgattgtaattctgggaaaacaaagacattcgcatgtccagctacctttgagtttggagccttcttttcactaactgcaggtacaaaagcggcatcaaattgcaattcaccatcagctggaatttctggatgatccttttggaacatagctgctgcatcatgtaccttatcaaccattggtccttcggctgaacccttagttgaaaagctcaaaaatgcgaccttaggatcaatttcggccatcttggcagtcagagcagattgatagccaatttcagctaaagtttcttcatcaggattaatgttgatggcacagtcggcaaaaatgtaacgctcatcgcccttttccattacgaaagcgccggatactcgatgcatccccttagctgcatgaattaattgtaaagctggcaaaacagtgttagccgttgagtgagcagcaccggaaaccataccgtctgcttttcccatcttcaccaacatggtaccaaagtaattaccttgggctaacttgagctttgcttcagcaatactggtatcttttcgtctagctttaacaaattccgctgccatttgatcaagttcatcataatgattgaggtcatagatcttaacaccagctaagtctaaattattttctttaactaacttagcaatctcatctggatttccaattaaaattggttcgataatgccatcttttttcaaattagctatggcagtaagaattcttaaatcatcgccttctggaaaaacaattcttttcttatcttttgctgcttcaacttgttttttgaataatgaaaatacgctcattttttacctcttatgctaaatcagatttacttatcgtttctggcaattgccagtcaatcggcgtttcatcaaagttcttcaatgccatattacaccgcgaaaacggtcgcgagccaaagaaccctcgatcagccgaaaatggacttggatgtgatgatttaatgataaaattcttactttgatcaattaatggaatcttgttttgagcaaatcgaccccacaaaataaagacgacttttccacgctcactcagagccttaattgcagtatcagtcacatcttcccaacctttgccttggtgaccgttagcatgcccatacggtaccgtcaaaaccgcattcagcaaaagcacaccttgatcggcccacttttttaagtaaccgtgattaacaggccgagctccgacatcatcatagagttccttatagatatttttaagtgatggcggcaaagttgtacctggcatgacggaaaaactcattccattagcttgaccaggattatgatatggatcttgacccaaaattaccactttagttttagcaaacggtgttaatttaaaagccgtaaaaatatgatacatatcaggataaatttgtttagtagaatattcttcttttaaaaaattatgcaattcgtgatatttctcacttgcaaaaacaggatccaatacttgatcccaatcgttgccaattaattctttagccaagtcttacaccctcttttcttctcctctttatggtatcattaatttaatactaaatgggagagaaattatgatcaaattagttgcttgtgatcttgacggcacgttgtttaattcagagatggctgtttctgctgctaatgcaaaagctgtgaaaaatgcacaaagtagcggcattgaatttttaattgcgactggccgggccccacgcgaatcacgttcagttctcaaagatgctgatttgcataccagttttatcaatcttaatggtgccctggtttttgacgaaaatgagcaattaatgatcaaacacagtattcccaaggcaaaagcacaacagctagtgcatttactacatcgatcaggcttttactttgaaattttaactgccaatcaggtttatagtgaaaatctagatcaacgtatttcaaatgtagctcatttaatggtagatctaaatcctctacttgattttcgtcaagctgtagcaatttctgctggtaataagactattatgaatatgaaacaaatccacagtttcgataatttattgcaagatcctaaaatagaagtaatgaaaattattgcttttgactctcggggacatgaagcttttaccgatatcaaaaaagaaatcgctacaatgggcgatctagtagtaacttcaagttcatcttctaatattgaaatcaatgagcaacatgctcaaaaaggtcttgccttacttgattatgccaagttaaaaggtatcgagcctgaggaaatcgctgcaatcggtgataatttaaatgatgagagtatgatccgagcagcaggtactggcgttgcgatgggtaatgcgattccagctattaagaaaatagctcaggtagtcaccaagcgaaacaatgaagatggagtagcttatattttaaataaatttattgcagataataacaatatttaaagttatgaggtgagtaagtatgcgattttggctagaacttaatcaggaaaaggattacggtcaaattcctgtgcttaatcaaaatggaaaagctgaattttttattcaaggcaatcttgataatccaaaccacactttatatctaaataatttccgtaaacaggaagtgggacgtctgttttctgatggtgcgggcctaattgcttcgttcacaattgatgtcgtcaaccactctttagtaggcgtaaaaaagttaaacacacctactgcaaacatattctatttgacccaattaaagtatattgttacaggtagtattaaacgtggtacttatacttttcgttctggaatcaagagtgtagcaagtgtccaaacaatcatgggagatcgcggaggcgttttaatttgtgatattactaagcctgaagacgtcccctttattcttttgacatccgttctatttacacaatggtatgttacgcctttgaaactgcctagttttccgccaattggatttgaggtaaatccaaattaaacaaaaaagcagtcatgaaaattttcataactgctcttctagaaagtgatatagatatagatgtatcttctgccataaagtttatatttattaagtaataaggaattattaggcagagactgaataatgaaagttaaatctaatttgattcaacctccatagcttattatacttcgttcagccaaaaatacaagggctagatgttattattttactttaaagatagctaaataatgcatttagagctagcttatagcttaataatttgttatttaacttagtacatctatttttctaaacaagacaactttaatttctacgtaaattgcaataataaattgaacacttttaatcaagctgcttgatagattagatctaattctctttcaaagatttcatctggtgtatgatatgccaatatctttcttggtaaagagttgcaccaggtttcaatgtctatgatgtcttgtagtgaataattgtctattgcctctcccttaggaataaatctgcgaatgagtccattatgtctttcaacggttcccttgtcacaagatgtataaggatgagcatagtaaactaaagtatttgatacgtcttctaagcttgaaagatctgcaaactctgagccattatcagtggtaatggttttaaaaatatcattccaatgttcgctgtattgcctttggagttctttaaaggcctgcatgacactgacagaagtcttgtcaggaatacgaagaattaagaactcacgactcatacgttcagataaggttagcagcacctcatcatctttgctcttatgtccgagaactaaatcgcattcccaatggccaaactcattacgtttattgatttctttaggacgttcttcaatgcttctgccaagttttttcttatttctgcgaatacgatgaagcttggtattgcgtttaagcttctctggcaagtcgtaattatgtatatctaatagaccttggtcgacataattgtaaagagtcttagtacagacaacatctctgctgctaaatgcgccaacagcggtggcgcgattactgcacacatcaagcgaccagccgtctttaaagaaatgtttgtggacatagcgcatgaattgagttttcctgagaaagtctgatttacgtccacaatttttacgatgagcttgatatgcatcatgcccttgagtagccttatatcttttgactttgccatgatacagttctacagtaccgcgcttaacctcataactgatagtagaaggggaacagtttaattcacgggcaatggcacgcaaagaatagccatctttcaaacgcaattgaataataactctttcctcgaatgataaatgcttgcctttaatgtgatgattcatggtagaatgtaaagagtccattttgacctcgtttctaaatgttgtgtggtaactacattctatcaaacaggtccgaatggactttttattttttattaagtgttcaatttaattttacaatcagcgactttaatttctattaaaaaatatagtgaaatgatcaagtgatttatcaatggcttgatcatttttatttactttatcaacgaacttgtttttagctatcaaactatataaaaaagagccaaatctaatgatttgaccctaaaaattctagattattaatctaaattattttttatgaattagtcttggtagtttaccaattctaagaatgattctggtactaatgaagcaccaccaaccaagccaccgtcaatatcaggcttagccattaattccttaacgttagctggttttacagaaccaccgtattgaatacgaacgttttctgcagtttcttcgttgtacaagtccttaacagtttcacgaatagtcttgcacatttcttcagcttgatctgatgaagcagtcttaccagtaccgatagcccagattggttcgtaggcaataacaagtgaagatacttgttcagcagttaagccgtctaaagcagccttaatttgagcaactacccagtcttcttgcttgttagcttcacgagtttcaagtgattcaccacagcaaatgattggcttcaagccattagcaaagattgccttagccttcttgttaatgtcttcgtcagtttcgtggaagtaaccacgacgttctgagtgaccaataattacgtagtccatacccatttctttcaagaccttaggtgaagtttcaccagtgtaagcaccttcgtcttcaaagtaacagttttctgcaccgatatgtaagtttgagccttcagcagcttttctcaaagcgtcaaggtcaactgcaggtgcacaaataagtgattcaaccttacttgggtctggtaacttatccttaacagcgttaacgaattcagtagtttgttctggattcatatgtaacttccagttaccagcaataattggtgtacgactcattaatctattgtcctttccttactattacttgtctgaaacgcaagcgatacctggcaattccttaccttcaaggtagttaagtgaagcaccaccaccggtagaaatgtgggtaatcttaggagcaatgcctaattgcttagcagcagcagttgagtcaccaccaccgatgatagtagttgcatccttaaggtctgccaatgcacgaccaacttccaaagtaccttcagcgaagttaggcatttcgaatgcacccattgggccgttccaaacaacagtcttagcatccttcaagatttccttgaacttttcaacagtcttaggaccgatgtcaagacccatcatgttgtcaggaatatcatcaccaacaacttcacgtgaagcatcatttgagaattcagttgcggctacgttatctacaggaagaacgatcttgtcgccagccttagcaagtaattccttagcaaggtctaccttgtcagcttcaaataatgatttaccaatgctgtggccttgagctgctaagaatgtgtaagccataccaccaccgattaaaatatggtctgacttaggaattaagttttcgataacaccaatcttgtctgaaaccttagcaccaccaagaatagttacgaatgggtgtactgggttttcaacagcatcacctaagaacttgatttccttttcaagcaagtaaccagctgctgcaggcttgccagcttccttcatagcagttgcgataccaacgtttgaagcgtgacttctgtgagcagtaccaaatgcatcatttacaaacatgtcgccaagacttgcccagtattcgccaagcttaggatcgttacctgattcacgcttaccaaagtcgttgtcgatgtcttggaatctagtgttttcaagaacgataacatctccatccttcatgttgttgatagcgtcttcaacttctttaccttcgtttgatggtacaaaagttacaggcttcttaagaagttcacttaaacgttcagcaactggctttaatgataattccttcttgtcagcatctgacttaacacgacctaagtggctaagtaagatagccttgccaccgtgttcaatgatgtacttaatagttggaagtgcagcaacgatacggttgtcgtcaccaataacgccatccttaattggaacgttaaagtctacacgtactaagacctttttgcctttaacatcaagatcgtcaacgattaatttagccattataatcctccgattattttgatattttttcttcaaaaaaaggcggaaggaagaatctccctccgccttctcaattaccacttaactatataatcagttaattaaaattaatgattaaagagttgcaaagtgtaataaagtacgtaccatttggcaagtgaatgagtattcgttgtcgtaccaagcaacagtcttaactaattgcttgtcacctgcagtggttaccatagtttgagttgggtcaaagattgaaccagcagtcatgttaagaacatcgctagaaacaatgtggtcaccgttgtaagcaaatgatgggctttcgtacttcttcatagcttcgttaacttcgtcagcagtaaccttcttgctcaagattgataccaattcagtttctgaaccatctggaactggaacacgttgtgcgtgaccgttcatcttaccgttcaagttaggcaataccaagccgatagccttagctgaaccagtagtatgaggaatgatgttttcagcagcagcacgagcgtcttgttccttaccactacgtgaaggaccatccaaagtcatttgagtaccagtgtatgcgtggatagtagtcatagtagcaacttcgataccgaattccttgtccaaagcgttagccattggtgcaagtgagttagtagtacatgaagcagctgaaacaatcttgtcatcagcagtcaaagtgtcttcgtttactgagtaaacgatagtcttcaagtcgttaccagctggagctgagatcaatacacgcttagcacctgcatcgatgtgagcttgtgacttagccttgctagtgtagaaaccagtacattcaagaacgaagtcaacaccatcgttcttaacccatggaatgttttgtgcttgtggttctgcgtatacgtggtaactcttaccgtcaactacgattgaatcttcagttgatgaaacttcgtggttgaaagtaccatgagtagtgtcgtacttaagcaagtaagcaagcattgctggagtagtcaagtcgttgatagcaacaacttcaatgtcctttgacttttcgccaaggtccataatacgacggaatgctaaacgaccgatacggccgaaaccgttaataccaattttaactgtcataacctaaagtcctccttaagaactataaacaacatttattttaaacgggatttcatttcccctttaaaatcatatttgaggcgccctcatcagtgattagccaggtttgatgaggcgcattaggcatataagctttaattgcttgagcctttcgggcaccacaagcaaaagcaaatatgtggggtattttgtataggttctcgaactgcaatccaacctgggtgatgcggtcaacaaccttgccatgttcatcgaagaaacacccgaaacattcggtgacggctctcttctcacgaagttcagatagcttaattgaattatagcctctgcgctgtgccatttcttgagctaacccaataccatgaatcacagcatcactttgagaaatgtcttgcagaacatctgcgatcgaggactcacgaatcaaagatttgtaagcatcatctgaaacctgctcaggtaaatataatgtcttataagtacctgaagtcttagcagccatttcttggacgattgtattactttgcgtctctacattttcgcccaaagctcctcgacctggaacaaattccaactggcgattgttagctaaatctggtgataaatacttagcagatctagctaacgccgctccacctagaattgtaactattgaatggcctaaaggcaagagtaaattcaaagctgaacttaatttttctcccatctcctcatatactcggtcttggaaatccgcattaccagggacgatcaatgttctttcaatccctaattttttggctaatgctacttccgtttcaccggcattaaagaggcgatcaagcaatggtcctgcatcttttaatgttttctcacccttttcagttaaaaacatcccaaaactttttgtttcaatcaatcctaattgacataagtactcagtctcagttctgatgtttctctctgaaagccctaaatgctgagcaacactccgacgtccaattggcgcatgtagcgaaatctgctcaaggacaagatacctttgtcgaagaatctttaagacgtcgggaacgagcgcttcgagcaaagaaaagtccgaatccatcgttccctcctttccatgggacatctatcgaccacctacgtgtcgttttgtgtcccagaatgcttaaaaatataagagaaacgtacttttcattcaattcatacatttcccaatcgacactgttagtataacaatgtatttttcgtaattcaagaaaaagatacacgattttaaaaaagtcgtaaatcgagtaaaatcatttttatttcattactttttttgatatactaccacttgtgaatcatctgggcccttagtgtaatggatcgcacataagattccggttcttagaatctgggttcgactcccagggggcccatataactacatgttgaagactaccgccatctcggtattcttctttttttataccaaaaaagcattcctcacggaatgcctttttcaatatcacaattatttagtgcttgtagtcatcaactcagcacgttgtgctaactcagtgtacaaagttgagcctgaaacagataaaccttcaatttcacggcgagtgttgaaatgatggctacccttataagtaccatttgctgctacacggaagatgtagtcgttaaaaccaatatagaattgattgtggttgctgtcataagcaaaaccttgaactggtgaaccagttacgaaattactttgagtagcaccgatttcttctggagcccaagtgtcaccatttctagttaacttccagtattcatattggtgacgaccaccattgtggaacaatgcatacatagtgttgtcgccaacaaaggttgcattatggaagtaacgaggatatgcactgctgccgttccaggtcttaacagtccagattttgttaatcttcatatcactctttcttacttgcataatttcttctgaagctgttgaattagcagtcttattgttattagccaaaacataaatgtagcttgaagaagagccaagtgattgaccatgacctagcttaatgtatggtgaaactttaatattgtttgcgtagcttctaaaagtgctccatcccatagtagttaagttttgagcagcatatttactcttaattgcattcaagttgtaagaaacaagatgtcctcttgagtcgctactgctagtgtacatagaagctgtaaaaataccatcattaacagtaataccttcaggaattaccccaacttgtcccattgcatcagcagcttgaccatagcctaagctgacaaaacgtggttggaacaaacgagtgcgcaaagtcatgccgttacctgaatagctatttgagctagtttctgaacgataaccgtgtgcctgattccaatttcttgatgatccctttgagccaccattccaagtatgaactgccttaggaccactcttaacagaagcacctgcactagtaattccttcatttgtatctgaacgaacagttacattaacgcttgcctttgccttaccatatgaataatctaccttagtagtgccggcacggcttgaactaacagagctatgtgaaacattaaccctatctggattaattgcagtaccttgtccatctgttgcatagttaattgcatccctagttggaaaactgtagttgctgttgtgaactaagctaacatcttgagctactgaaatttggtttctagcaaaaaagttttgacttacccaacctacattgcgtccatcgacaataatgtaccagaagttacctttcttggtagaaacatacttcttagattgaatttgaccatgcttaaagtacttggtatttgaaaatgcacctgatggtccttttttagatacattatgataaatagcgtaattaccattgccagcaatcttagtaactgccttgctgtagcttttggcatctaccttgctttgactaatggcaaaaacaccaccaactaatgcagcactggccacaaaagttaataacatctttttcccttttaacatccttattaatcctcccatatgaaaaaatcacgttcattttagcacaaatttatcaaatgaaacatctaattattaaaaaatttcctgaacaacaagactttgaaaacgcttctgttatataattaaaaagttcacataaatatataaatagtaatagggagaaattttatggtcgaatcacaaaataattccaaaaagatgatgtggaccaccctagcaatgatggccttctctaccgtgtggggctttggtaacgttgttaatgggtacgtctactttgacgggacaaaggttgtctttagctggatcgtcatgttccttctctactttgttccttatgccttaatggttggtgaacttggagctaccttcaagaatgctgaaggtggggtttcctcttgggtaaatgccactatgggcgcaaaatgggcctactacgcaggttggacctactgggcttgccacgttgtttatatttccagtaaaggtactggtggtttaagagcgatggcctggggtatcttcggaaatacaaaatggtatgatggcttacctaccgcttggacacaatttgctacattagtagtcttcttgcttttctgttgggttgcaagtcgtggtattccagtattgaaaggcctagcaacaattgctggttcttcaatgtttatcatgtcaatcttattcatcattatgatgtttgccgcaccagctattaatccttctgctggtttccacagtattgactttaactggaagaatttgatgccaaccttcaacgtaaaatactttacttctctttcaatcctagtatttgccgttggtggttgtgaaaagatctccccttatgttaataaggttaaggatccttccaaaaacttccctaaggctatgatggctttagcaatcatggttatggtatctgctattttaggtacttttgccatggcattaatgtttgaccctaaggtggttaatgccaaccttaacgaatacatctctaatggtgcctacatggcatttgacaagctgggcgaatattaccatgttggcggcttgttcatgtacatctattcatggtgtaacgtaatcggtcaattctcaacattagtaatcagtatcgatgcaccacttagaatgcttttgggtagtaaagaagctaaagaatttattccaaagggcttattaaaactcaacaagcatggtgcttacatcaacggtatctggatggttgttgtcctctctggtggcttaattgctattcaagctttagtaccaaatgctcaagctgttatggcacaattagttaaattaaattcaactactatgccacttcgttacctttgggtatttgcggcatatgttgctttaagaaaacagcagcaaaagttcaacactacttatcaaatgactaaacatcaaggcttagcctatactgccggtatttggtgttttgtagttactgctgcatgttgtatcttgggtatttactcaccagatccatttaccttattccttaatatcttgacgccaatcgtcttgattgcattaggtttaattttgccaggaattaagaaatatcaagaagcaaaggcaaaataaaatttaaatacagaattttaaaaaggaagcaatttcaaaagactgcttcctttttagtgtatatttttatttattagcccaagcatttaccaatgccttgtacttggcaacgctaattcctgcacctttactgcttcctaaatatgaatcagcatttccataaccagtattgcttacattggcaaatcccattactctataatttctgttaatcaaattcaagtagtgtcctgccattttatagccgttcgtgccctctacggccgcatcataagttgccgtccaagttggactatacttcgccggcttcaacgaatgattcttttttacatcataattccaacttttcttttcagagaaccaagtatcaaccggatctaaacccacactttgagtagcgatgttttccaaaccaatcgacttgaaataatgagtatgctttaagccaccacgtttttgatagtcagcatttaacattgaggctgctgtcaaaagtggtgacacctttaatgaccgaaccccttcacttctacgtgctctattgacactattcaaataaggcaatacagctttaatattcttagcactagttgcatcatcatttgaatgcaagtcaacgtattcattgtaccaacttgccttaggctttttacctaagcgacctgttttcaataatttcactgctgatctagcagagcttctttgccctttagtcaaagatttgtttttagatagatatgtcataaaatcaacggcatttttggctgccttaactggcttggaactcaataccgttaaagataaggtcatcatcacagctgatgcacctgcaattaaaaatcgttttttcattctttttctcccatattaatatatgtgaactacgatttaattgtagcacatacactaatggaagattttccttttaaattgcattatccatccatcttaacgtattgtcctttttcatctacaacacctttgaaatggtgcatgctgccatcttcggcctgaaattcacctaagtcaatttccccatagccctttgtagaatcagtaaccttaacatcatcaaaagtttctctgaaaaattgatgaacaattctactcttcaaccgtatatcctttgaatgctcaaaggctgcagacaacgtaaagccctcatctaattgttccttgataaaaacaattagatacaaggtcgctaaattatagcggcgcacaccactttgatcatctgaaatcggcttaatgtagcccttagtttcccaatagcgcaattgcctttgcgaaacaccggtcaatttactaacttcaccgattccaatttctaaattttgaaaaatgtcatgcataatttttttagatttcatcctgataccaccttacagtatagttatattttatatattgttgttatcttttgcaacacttgtgttaatttatctaacttatttgtaagattatttgacaatggaaaattttaagcctatagtttttatagttaacttttataagagaaaggaatattacatgaacaagcaaccaacggatattcatggaaaagcttataatcgaaacctactagttttagttttaattataggttctttctgtactgtattaaacggaacactgctttcaacagcgcttccttcaattatgcgttcatttaacatcagcaccgcaactgctgaatggctttcaacagcctttctgttagttaatggtgttatgatcccaatttctgcatggctaatcaatcgcttcggttcaagaaaaatgtatttgtcagccatgtcaatcttctttattggaacagtgatcgccgcaattgcacccaattttggcaccctgcttgctggaagaatcattcagggattaggcgtcggcgttactatgccacttttacaaacaatcatgctttccatcttcccagctaataaacgtggtgcagcaatgggaactgtcgggattgttattggcttagcaccggcaattggaccaacattatctggttggattgttgataacctttcttggcgttatcttttcagcatcattgccccaattgcgggaatagtaattatcttagctttctttttaattaaagatgttttaccaactaagaaagaaaaaattgatgtttggtcagtaacaacctctactctaggcttcggaagtctgttgtatggtttttcagaagctggtaacaaaggctggaccaatcccgagattttaggatttattggatttggaattatatttgtaatcctattcggtatccgccaattgaaaatggatgacccatttttggacattaccgtttttaaacactttgaattttcactggcagctgccttaagtggtatcaccaacttagcgatggtcggcattgaaatggttttaccattatatattcaaaatttgcgtggcgtttctgccttccattcaggtttaatgttactacctggtgcattgatgattggtattatgtcgccaattactggccgtttattcgacaaatatggtgcacgtaaaatggcaattactggtatgactttgttgaccattgggactattccattcgtctttttaactgaacaaagttcatacacgatgattatcattctttacgcaatcagaatggtcggtgtagctttggtaatgatgaatgttactacatctggtatgaattctttaccattaaacaagatttctcacggtactgctgttaacaacactttcagacaggtattaagttcaattggtactgcaattttggtatctgttttaactacaactaccaataataatatgcctggtaaaagtttacttcatgcactgccacttgaatacaagactagagcaatcagtgcaactttagacggttttcatgcttcatttgcaatgagtatcctcttctcattaatcgcattagttctttcattcttcttaaagaagggcaatcgagcacgtgaacatcaagaaaaggtggatggttaaatgatacttttaattctaatcgtagctgcaattatgtttatttactttaatatcatccctggaaaaaggcatacttctattgcatggctatcattaatcgtaacaattctttgtgttgttggcattgtagaacatgattataatcactggggaatgaaaactgaaacaacttcaagcactaatactctagtttccagtgctactcctcgcctgccaattttgctttatcagcctttaggtaatggaactgaaaaagtttacctttataaaactggtcagcttcaaaagaagccaaaatctattaaattacgcgtggtgctagttaaatcgttttagttaataaaaaagtccaatcttgttagactcgacttgtaaatagtaataatagaaaagagtctgatctgattgaactgccttaagcttaagcgttttagccaccatttacaagttagttttaaagatttagtgataatttgtcggcactggtatcgtttgtatgcaccggctgagtttactcatcggcgaaatattgatcaaattaaaactacggacagtctgattttggctttacttatctggcaagctaagacaggaattgaatcacaaagaagattctgtgaatgtttcaattgtttatcacactcacgttttaatcggcgttcacgtcagctattgcaattgatttatcagatacggcaagaaatgaataaaaaggttgacctgaatggacagttcttgatcattgacagctttccggtacctgtttgccaaccaattcgaaactatcgtgctaaaatttttcgcggttatgccaacattggttataaggccaccaagaaaatttacttctatggtttcaaagttcatgccattgttagcgatgacggttacattcttgattatgtcgtaacaaaggcatcagttcatgatgccagggagacagttgaactgatagaaaatacccatccatctaattactatcttcttggcgacgaaggctatttaggcaaagaactgcatcaacagctaaaacaaatgggttacgaactttggacaccatatcgtaaaaatatgacaggagctaaaaagcacaatgatcatcaattgatggctattcgcagaacaattgaaagcgacttttcgcttctgacctattacaatgccgagaacaatcgagcacgtagtctgataggctttcaaagccggttggaaattgcaattttagcttataatttggcttattgtctagaacgatttaactagcaccacgcgtattaaattagataaagtatcgacaaaagtaaaacgaagcagccaaccaaaagtaacgattaagactactcgctacacctatagcaatacctttaatcaaataatgtttggcgtctttggtcatgacaaggagttaaaacacagagaatatattttttctattccctccaactggaaagtaatgtcagttaacgatgccaagcagttgcaaaaacaaatgatgaaaaaacagcagtttttaaaacaaaaatcagcccaataaaataatgaagctcaaactttgatcatgatatgaaccccgaaattcggacatgaatttcggggtttttatttatggctaaattatctaaacatgacaaaattgatatttacaatagctagaaaaattaaattcattttaactcaaattttaccatatgatttaagttaacttaaatcacctttacaaacgcttatgaaatataatttaactaaatctaaatgtagaaaattatttttatcatactgcctatttcaattgcatcctatcattaaagtaatttttataagccaaatagccactaatcacggctccaaggccagtggcagaaagtaacataaatgtaatcataatctgatacttaattgcataaatgggatttacaccagcaaaaattaagccggacatcattcctggcaaatttactaatcctacagttttagccgaatctatcgtaggctgcatcgcagtcttaatgctccttcttaaaattggcatcgatgcagttttaatatcactacccaaagccaacttttctaaaacttgttgatgcagatcattaaagctatcattcaacgctttatagcataagccaactgccaccatttcatttccagcaatcatccccgtaatgggaatgacctgcatagggactggtttaattacgccagaaaaaatcagaattcctaatgtcacgtaagtccctaccgcttcggctattatcgaattccaaatattccgccccggattaggatcacgctgattagcattccaagatgcattaaaaattatcacaatagttgaaaccaaagttagccacaaggcattaacatgaaaaataaacttcaaaacgtagccgattacgactaactgaattatcgccctaatcacgctaattaaaatatccttggttagtcctaatttttctttcgcagaaattccaatggaaactaacaccagtgcaaaagctaatactaacgaccagttgctaactacaacatttttcattcgattattccgcctttttttactcttaaaatattacttgcttcatcaatttcactttgatcatgtgtaacttgaataattgtcacgcctttctcagaaacatccttaatcaaattatgtacaatatctttactttgattatcaagcccggtagttacttcatctaagagcaatatctttggtaaaaatattatgtttcgaattaacgcaactctttgcttttcaccacctgataaagcagtaatctttttatctaaaaaatcagcagagagatcaacttgattaagtaaatcagctatttgcttgtcatttacatctacttttctaatttcatacgggaaaatcaaattatctcttactgtttgcccaaataaagacggctgctgaaaacaatatgaaacttctctacgatattgaactggatttaaggagctaatgtttttttcttgatatagaatatcgcctgaattagcactaattaaatttgcaatcaatcgtaaaatcgtactttttcctgcacctgatgggccaattaaggttagaaaatcgcctttattaaccttaaatgatacatcttgcaatatttgttttttatctgcactatattggatatgttttaattctaatattttcattcttttgcctaactaaataactcatttttctaattatacaactaaaaaaataaaggaaatccaatattttcattgaatttcctttatttaaattaatatcgataatgattacttagtcaacttttgtttactttcaagtaattcagcacgttgagctaagttcatgtataacttgttgttgtaggttgcgataccttcaatttcacgaccagtgtggtattggtaagtatccttaacttcaccatcagttgcaatcttagcaattacgtcattgaatgcaaggtagaagttattgttcttggcatcataagtaaacccttgagtgtatgtgtttgctacaatgccacccttagttgcacctaccatagttggataccagttatcgcctttgcggttgaattcccagtattcagtttggtctttttctttattataaagagttgtgtaaagcttgtgatcatttacaacaacaccattattgaagtaacgaccgtctgaatcactaccgttccagcatttaatagtccaaatcttgttaatgcacatatcgctcttccgaatttggattaactcttcagacatattgctcttgtatgaaaccttattattgttatttagaacgtaaatgtatttatcagttgagcccattgcttgaccgtgaccaattggaatatatggactaactttaatgttcttaacgtaagaattgaacttcttttggctcatatcaagtaagtattgtccgttaaatgcattggttaaatggttaagattatatcctacaatatgaccattgctaatcagggtactacttaataaactagtgtacaaccagccatttgacatggtaattccttcaggaatatgacctacacggttaatatagtcatcatttttaatgtcacggtaaacacttaataaaactggttggaagaagcgagtagtgaaatctaattttccgctttcactatcataagcatgcttattcttatcaggagtaaaatcagtcttagttacatagttagcagaactgccgtagtaagtcttccaggatttcaaatcgccgttaaatggcttagcttggacgctatcagcatcagcaattccttccttagtactctttctgacagttaccttaacagttgcctttgctttaccatagctatatttaacattataggtacctggagttgagcaatcgattgcatcttctgaaatcttaatatctgctgtatcaattacagtacccatataattggttacataacttactgcatcagttggatcaaaatcgtagtgactattttgtactaaactgatagtctttggtacagcgatagcatctcttgtaaagtagttttggttaacataaccaactttacgaccatttacataaatacgccaataagttgcatcctttgtcttaattctctggtcagattgaatatgagcatattgataatcgctagcatcagcaatcttaccactaggtttaccattactaatctttttataaacaggataattcttattgctacctactttaaccattaagtcataagaagtacttgtttgagctggtcccttcttcgcactggaatcagtcttagcagtatctgtattactatcagtagttttagaattatctgcaaatactgcatttgtagaaccaattaacaaaccaacacccagtgctacagctgaagtagcagttaaaattttatttgaatacttcaaacctatcctccgtatcttatattttgcattttacttttatattataatatataaacactgttagctaaaatacatttttattaccattgttaccattgagcttctttatttgacactttcattacgaagtgatttaattagcactgtacttgaaagagtgctaattaatacgaaatcaattaggaggcaaatttatgctagtacctacagttattgaacaaactgctcgtggtgaacgtgcttatgacatttactcacgcttattaaaagacagaattatcatgcttagcggtgaaattaatgaccaaatggctaactcaatcatcgctcaattactcttccttgatgctcaagacaataccaaggatatttcactttatatcaactcaccaggtggtgtaatcacctccggcttagctatcatggataccatgaactttattaagtcagacgtatcaactattgcaattggtatggcagcttcaatggcttctatccttttgactagtggtaccaagggtaagcgtttcgcacttcctaactcaactgttttaattcaccaaccattaggtggtgctcaaggtcaacaaactgatatccaaattgcagctaacgaaattttgaagagccgtaagaagatcaacgaaattttgcacgaaactaccggtcaacctttggaaaagatccaaaaggatactgaacgtgacaactacttaactgctgaagaagccaaggaatatggtttgattgacgaaatcatggttaataagaagaagtaattaattattaaaaattattcacactctaaaaggagcttgcactcattgtgcaggctcctttttcttattctcttaaactctcagctaactcatgtagtttcttaaatcggtgattaactcctgacttcgaaatcggaccatccggaatttgattagctacttcctttaaagttaattctggatgcgccaatctaaaacgcgctaaaacttgcaatttctctggtagatcatctaagccgttttcttgttcaatcagctggatgtcttctacctgcttagctgaagctgaggctgtttttttcatattcgcggtatcacaattaaccaagcgattaaccgaatttcgcatatctcgcataatacgcaaatcttcaaagttaagcattgcattaagtgcacccactatatgcaaaaagtcgccaatttttgcggcttcttttaaataaacaatatagcctcttctacgtttagttgctttagcatttaaataaaaataattattcatcaacttacataaatcctcattatggtcctcataagttgaataaatctccaagtgataacgactcgtttctggattattgacactacctccggctagaaatgcaccgcgtaaataggacattgctccttcacgtgaagtcataattctctgcggaattcgcgttaccaaacctttttcaggatcccagatttgtaagttttctaggatttcttgtaccttctgattcaatcgtaccaaatattgattattttttttcaatttcatcttgcgcgagacaatcagcaatggctcaataccataagcaatcttaatcagcttaaaaattcgtcgagcaatcgcaggattttctgtagttatatctaggctaaattgatgatcgtgcaagtttaatacaccattcattcgcaaaaaagcagctaactctgctttggcatgctctggatgcacctcaagcgaagttagctcctttttgacttcactagcataactagccatcattttccttcattcttttacgtgacattgattcaaatgccagattaataatttcttttcctaccttttcaccatcatgaaataccaatccatgacgttgatcgataaagtcatcagtaatgacacggcagttttgctttcttaagccttcaaagtcattcttaacaggctcaagataagcatcataatcttctgggtgaaatttgctcatatcaattttggcaccattaaccagagcggtattgatataatttccacctaagtgatcgttaattacctgtacgtgttccgcatcactaaagtgatctgtctcaccacgctgagtcatgatattgcaaatataaataacctcggcgtcagtctcacgcactgcttcacctaaattagagatcattaagttaggtaaaattgaagtaaataaactacctggcccaagtacgactgcatcagcttgcataatcgaagccagtactggtaaaacagctctaggctcttcatccgaatcagtatcggtcacccagacacgcttaatccgcttatctttagatgtgatttcagtttcaccagactccgtagttccatccacgaattctgcgtttaaagtcaatggttcattggatgctggaaaaacatgaccatcaattttcatcatttttgacaaagattgaactgcatcaaagatattgccatgcatttcattcaatgccgcaataattaaattaccgattgcatgtcctgaaaaaaaggaatcggatgaatcaaatcgatactgaaaaatattcttttcttcctgaggtaagtcactaagtgataccaaaacattacggatatcaccaggtggaactacgttaataaagttacggattgaaccagatgaaccgccgtcatctgaaaccgttacgattgcagtaatttccgcgttttgatcttttaaggcattcaaaataactggtaaacccgtaccgccaccaattacgactacacggggacgtctgcctttaatcacgcgaacaatccttgtttctccatatggcacaggtgcgcacctactttctaatataacgactcacttcacggtgagtaatatcgactggatattttttagctaaatctcgtgccaactgttgggcaattgaaacactccggtgttgacccccagtacaaccaattgcaatggtcaacttttccttcccctctttgatatatccagggatagctgtttcaagcaaatcaagcaattttttataaaagacctgtgtttcttctttgttcatcacatagtcaaatacacgcttgtccagtcccgtaaatggtcttaattctgaaatataaaatgggttaggcaaaaaacgcacatccattacaatatctgcatcaattggcatcccatacttaaagccaaatgacatcacttcaattgaaaatggctgccgcttgcgatcactaaatgtattgattaatttttgctttaattccttagtcgacaagtttgacgtatcgataatataatttgatctatttttaattggcattaaaatacgacgttcttcttgaatgccatcaagcaagcgacctttgccattattggctaaaggcggaagacgccttgtttctttataacgagcaaccaagacatcatcggaagcatccaaaaataggatagtagcttgcacattgccattatcttcaagtgaattaacttcatccaataaatcgcgataaaatgtcttaactcgtaaatcaattactacggctaccttatgaaagtcattggaattattaattaaatcccaaaaactacctaataaagttggaggaagattatcgactacaaagtagcccatatcttctaagtcatgagcgaccacagttttacctgctccgctcatgcctgtgactattaataatttttttttctcatcagccatactgaaatcctcctctttacaaattatatcataccgggtgtgtcataattgtgcaaaaaaaagaagcctttcggcttaaatttttatcaaatattaacggtgcataaatgcaaccacaatttcattaatgccaaagactaataaccagaatgcaactaaccatactaagcttaaggctgcgattactggattaataattaagaagaaggcaataatcaaacttaaaatattcaaaatcaagttaaatacaaagtatccggttgaaaatgcacgtaagtgccatgaccaagcaatacctacaactgaatcaacaaagaaccagattgcaaataagtaagcgatagtcaaaccaccaatatcatatgagcaaatgaacaagataccgataatgatatctaatacacctgacacaattgctacccaactacgtgagaaaaattcacgaaagcgtgagtaagcagccaaccatacaataccttgaacgattgatacaatagcaaaaatcaagacaaatgcatgcaaccctttagctgggtgacgtaataacacgaacgcaactacgaccattaagataccggcaataaatgcgccccagtcaaagccgtgattatctctagaactagaaaaaatatccatttttattcctccttgcagactattttacacttattcaaggttaataaaaactattggctattgtcttctagcctatttttttgcttcttttgttagtttagtatcacgttctaagactggtttcaaatactgaccagtatagctttctttaactttcgctacttcttctggcgtaccggtagccacaatttgaccgccacgttcccctccttcaggacctaagtcgatcagccaatctgcatttttaattacatcaagattatgctcaataattaaaaccgtattgccttcatctaccaaccgctgcaaaacttctaataaacgcttgatatcatcggtatgcaaaccggtagttggttcatcaagaatatagaaatttttaccagtagaaagcttttgcaattcagcagctaatttcattctttgagcttcaccaccagataaagttgtagcggattgacctaatttcacatagcccaaacctacatcaacgatagtctggagtttacgctgaatcttaggaatattttcgaaaaacttagttgcttcattaatcgtcatatcaagcacttgagcaatattctttccccgataagttacttccaatgtttcagaattataacgagtgccgtgacaaacctcacatggtacatatacatcaggcaaaaagttcatttcaatcttgataattccatcaccatgacaggcttcacaacgtccacctttgacgttgaacgaaaatcttgctttagtataaccacgcaattttgcttcattagtttgagcaaataaggttctgatatcatcaaaaacactagtataagttgcaggattactacgtggtgttctaccaatagggctttgatcgatatcgatgattttttcaatattcttgtaacccttgattgacttatacttacctggcttagttgaattattgtttaatttttgggctaaagcgcgtttcaagatcatattaaccaaagtagatttaccagaacctgagacaccactgaccacaataaatttgcccaacggaaaatcaacattaatattctttaaattattttcttgagctccagtaattgtaatctttttaccattgcctttacgacgcttcaatggaaccggcacaaattttttaccagacaaatattgccccgttaaagaatcaggattctgctctacttctttaggagttccttgtgccataactttaccaccgtaaacaccggcaccaggtcccatatcaaccaaatagtcagcttgccgcattgtttcgtcatcgtgctctaccacaattaaagaattgcctaaatcacgcattctctttaaagaagcaatcagccgatcattatcacgttgatgcaaaccgatagatggttcatccaaaacatacataactcccgataagtttgagccaatttgagttgccaaccgaatacgctgagcttcaccaccagacaaggtattagctgatcgagaaagagttaaataatctaatcctacactatccaagaatgaaagacgatcgcgtacttcctttaaaatcggcttagcaatcatagtctcttgctcgcttaatttgacgtccttaaagaaatcaagtgctttatcaatagaaagctccgaagcttccgcgatatccttgcccatgactttcactgctaatgctttttcattcaaacgcttgccgtgacaagttgaacaagtaagttcagtcatatatttgcccatcacatcacgcataaacttggacattggtcgtttataacgccgctcaacattggccattactccttcaaatggttgaacggtatcattaacgccaaagtcaccagttacatggaatttcaccggcttagttgagccatgcagaataatgtcgcgttgacgtttagttagtttattaaaaggcttatccatcggaatttttaatgccgtgcaagcttgttccaacatttcagtatagtaattggaagtcttccatggagccagtgcaccttcagctaaagattttgttttgtccggaacaaccaaatcttcgtctactgctaacttcatccctaacccatcacaatcaaggcaggcaccaaatggtgcattaaaggagaacagtcttggttccatttcacccacagtaaagccacactttggacaagcataatactcagaaaagttaagcatttcaccaccaattacatcaacattcatgtagccatctgacaaacgaagtgcagcttcaatagaatcaaataagcgagacttaatgctatccttaacaatcaaacggtcaacgacaatatcgattgagtgacgcttgttcttagctaattcaaaatcctcaccaatttcgtgcatctcaccatcaacaattacacgaacatatcctgcacgttgcactcgcttaaatacttccttgtgttctccacgcttagcacgaataactggcgctaaaatttgaattttcgttctttctggtaaagccatcactcggtcaaccatctgatcaactgattgtcgttgaatcagcgtcccatcattaggacaaattggatggcctactctggcccaaagcaaacgtaaataatcattaatctcagtgacggtcccaactgttgaccgtggattatgtgacgttgttttttgatcaattgaaattgctggatttaaaccatcaattgaatccacatctggtttatccatttgccccaaaaactgtctagcataactagaaagtgattgcacataacgtctacgcccttctgcataaagcgtatcaaaggctaaagaacttttacctgaaccagataagccagtaataactactaacttatccttaggaatagttaaattaatgtcttttaaattatgttcacgtgctccgcgaataacgatcttatcatttgccattaaaattctttccttttcttgatgatttttgcaattccataattgcatcccgcaagttagcagcttcttcaaagtcaagcttcttagctgcttcttgcatttgctcttgcaagttgctaatcattgtcttcttttgcttagccgtcaattcatcaaaattaagatctgcaaaactatcagatttttcttctttttcactcgacggtttagtaatcgaaattacgtcttgaatcggcttaatgattgtcttaggcgttatgccatgctctttgttaaattccatctgaattttacgccgacgcttggtagctttaatcgctgctctcatggaatcagtaatcgtatcagcatacatgattacttcaccattggcattacgggcggtccgtcccatagtctgaaccagcggccgatatgctctcaagaagccttccttatctgcatccagaattgctaccagtgaaacttccggtacatcgattccttcccgcaacaggttaattccaattaagacatcgaacttacctaaccgtaagtcacgcaaaatttgcattctttccagcgtcttaatatcagagtgcaaataacgtactttaattcctaagtccttcaaataatcggttaagtcttccgccatttttttggtcaaagtagtaacaaagactcgttcatgacggtcaatccgtttattaatttcgccaactaaatcatcaatttgaccctcaattggccttacttcaatcttgggatcaagcaatccggttggtcgaataatttgttcaaccttatgatctgttcgttcaagttcataatcacctggggtagctgagacatacaaaatttgattaacatgcttttcaaattcggatagctttaatggacggttatcaagtgcagatggcaaacggaaaccatagtcaatcaaggtttgcttacgattacggtcaccattgtacattgctctaatttcaggcatagtagcatgtgattcgtcaattaaaattaagaaatcatctgggaagaagtccaacaaagtatacggtggctctcctgcttttcgtccttccatatgccttgaatagttttcgattccgttggtatagccaacttcacccatcatttccatatcataggtagtacgttgcttgattctttcagcttcaagcaatttgccttcgccttcgaactttttaacctgcaatttcatctctttagaaattgctcccaaagctcgccgcaattgctcgtcattggtcataaagtgcgtagctgggaaaagcgaaatactctcacgctcaccgatcacctcaccggttaacgaatcaacttcaacaatgcgatcaatttcatcaccaaagaattcaattcgataagcatgattagaattgccggctggaaagacctcaactacatccccgcggacccgaaaacgaccgcgttgaaagtcaatatcattacgatcatattgaatatttaccaaatcacgcaacaaggtattacggtcatattcttcgccttcatggatcatcaagacactgcgcgcatactctttaggatcacccaaaccatagatacaagaaaccgaagcaacaactactacgtcattacgctccattaaagctgaggtagtagcatgccgcaactgatcaatttcatcattgattgccgaatccttttcaatataagtgtctgattgtggaacgtaagcttctggctgataataatcatagtatgaaacaaaatattcaactgcattattaggaaagaaacttttaaactcaccatatagctgccctaccaaggtcttattatgcgtaataactaatgtaggcttattcagcttagcaataatattggccatggtgaaagttttcccagtaccagttgcaccttccagaatctgttctttatatccttttttaaatccagcagtcagtttatcaatagcttgctcttgatcaccggctggtttaaactttgatactaattcaaatttgcgatttttttgtcgtttaatcataaaaaactcctcaagaaaaaagttggacaagcatagtccaactttttaattagtatctatattttactaccgcgaacgtgctttcgcacgaaaaatgcttaattatttaagtaaatctgctaaagccttttgataatcttcagctgccttttctgcagtggcaatgtcttttttgtttacaccaacataggccttaattactggttcagtacctgatgggcgaagtgctacccaggtttcatcatctaagaagtacttcaacacattagattctgggaacccttctaatggtgtctttttgccattttcaatagtttctttttgcaagaaatcttgaatcttaagcactttactaccgccgatttcagttaagtgctcattacgcaacttgctcattaattcggccatcttcttttgaccaccaatacctggcatttcaattgcacgggtaatttcataagcaacgccatacttttgccaaatttcttgcaaaccatcaaagacagtcatcccacgtgaagcatagtatgaagcaacttcggcaaacatcaatgcaccctgcatggcatccttatcacgagcaaatggtttaaacaaatagccatagctttcttcaaagcccatcaagaacttagcatcaccagctttattcatccggtcaacttcttcaccaatgtacttaaagcccgtcaaaacatgcttagtcttaataccaaagtcctctgcaatcttaaatggcaaagcactagaaacaactgaagtaacgatctcataatcaggggttaattgaccattttccttcatatgagccaataggtagtaagccatcaaagtagcaatttggttaccagtcaaaacttggaaatcaccatcagtttttctaactgctgcacccattctatcagcatccgggtcagtagcaataatgacattagcatttacctcatttgccaacttaaaaccaggttcaaaaacatcacggtattctggattaggcttaattgtggttggaaattctggatcaatgattgattgacttggcacaggaatcacattatcaaagccgccttgtctgaaagcacgatcataaagcatcttgcctgtaccatgaagtggagtataaatgatctttaacttgtcagcgttggccttaaccatctctggatcaacagttacttgcttcaattcattcaagtaatcttcatcaacatcttcacctattaactgcaaggtgccattagcacgcaattcttttactggtgcagccttgacagcaaaaatatcagttactttttgagcataagcaaaaagtcgatctgcattatctggtgccatttgtgcaccatcttcaccgtaaactttatagccattgtattgcttagcattgtgtgaagcagtgatattaattccagcgaaagtatgcaaatgacgtactgcatatgaaagttctggtgtcggtcttaaatcatcaaataagtaaacatgaattccgtgtgcacctaaaactctggcagcatgttctgcaaactctcttgagtgatatcttgaatcaaaggaaatagctaccccacgctttttagcatcagcaccattttcttcaattaaacgagctaagccttcagttactcgacctacagtaaacaagttaatccggttggtaccgggttcaagacgaccacgcatccccgcagtaccaaaattaatatcctgtccaaaggcatcttcgatccatttttcatccttgcccaaagtatttaattgatcttttaaataatctggtaaattagtagctttttgccattctgtataaatttctttagcgtccatcaatgtcctctattcattaaaagttggatttctaaagcgctttcaaactgttaacaattttctattatctgctattaattataaaacttattagtcattaatttaagctttagacaaaaaaagacatgtccaatacgaacatgtcttaatgaaaaaacgaataaatttaatttttcttgtcttgtaagtcttggtagtaattatatgcagcttgaccagctacactaccttcaccaactgcattagcaatttggcgtaaatctttttgacgaacatcacctaaagcaaagataccaggcaccttagtttccatatgatcatcagttacaatccaaccatggtcatccaagataccaagatccttaaaaggttcagtttgtggtaaaacacccacgtaaataaagacaccagcaactggaatttctttttcggcaccagtttccttatcgcggtacttaacccctgtgactttcatgtcatcgcctaagatttcttcagtttgtgcattccaaatgaaatgcatcttcttgtttgcaaatgcacgcttttgcaaagttggttgtgctcgcaattgatcacggcggtgaataactgtaacgctcttagctaattgtgaaagataaattccttcttcaattgctgaatcaccaccaccgatgacagctacatcttcatctttaaagaaagcggcatcgcagacggcacaatatgaaacacctttgcctgaatattcttcttctccaggcacattcaaatgcttatgatctgaacctgtagcaataattacgatcggtgcacgatactcattgccatcatcagttttaactaacttatcctcgccatcgagttcaacactttgtacgttgccatacttataatctggttcaaacttcatcattgtgtcgtacatcttttgactaagttctggacctttgatttcagaaaaaccaggataattgtcgatagcatcagtattgttcatttgaccgccatagggaccgcgatcaagaacaagaatctttaagttagcacgcgcagcatataagccagcagtcatcccaccaggacctgcaccaataataattacgtcgtatttatcagccataatctgtccttctttctacttacttttgataagcaaataatacaatagatttaacttcttgccaactattttgcttatcttttataaacgaatttcaggctttggttctctacccatcattttcttaatttctgtatcaacatcagcatcttcataaagaacacggtagattgcctctgaaattggcatatcaatgcccttttcttcacataattcgtgaacagctttaacagtagtagcgccttcgacaacttgtcccatatttttcaaaacgtaatctaaagtcttgccttcgccgatttgtttaccagcacgccaattacgtgagtttactgaagtacaagttacaattaagtcaccaatacctgacaagcctgagaaggtcattggcttagcaccaaagtattgcacacccaaacgagtgatttctgctaaacctctagtcatcaaggcagctttggcgtcatcaccatatccttggcctactaaaatacctgcagcaatcgcaattacgttcttaacggcaccaccaacttctacacctactaaatcatcgttagtgtagaaacgaacgtagtcattggagaacaattcttgtacccgcttagcattttcttcattagttgatgcacatgcaatcgcggttaaatctttttgagcaacattttctgcgtgactaggacctgaaattgcaacaatcttatcttcatcatctggataaatttcttcagttaaaatttcagaaataagcttcttactgcctggttcaatccctttagttgcagtaactaacagtggcttagcacccgtcttatctaaaaccttgcgtacgtttttagcaacgattctaactgccttagttggcaaaacaaataaaacaagttctgccccatcaagagctgcttccaaatcaccagtagccttggtattctcatttaatttccaatccttcatatagtggctattggtgtggtgagcgttaatttcttcattaacactatcaatgttaccgtaaagagttacatcgttaccattatcggctaacattgaacccaatactgaaccccatgaaccattacctaaaactgcaatctttgtcattttttctctcaaactttctaattaaaatcttttattaattctaatctcttgaatacgggtattttaatccactaccatccaaataccattttggattaacgactttccgccgataaatccataaaataattgtagcaataaagaggattaaacttaatgcctgtgatactcgtattataccaaaaatatacagactatctgtcctcattccttcaacgaagaaccttactacactataccaaagaagataggtcatgaaaacttctccctgcttgaagagatgttttttatgacgcaaggatagaattaagattaagccaatcaaattaaaaaatgattcgtacaaaaaagttggttgataatacgtcccgcctattttcatttgctcaataataaattgtggtaagtgtaagctttgtaaaaaatgaagagtagttggtgcgccgtgcgcctcttgattaacaaaattaccccagcgtccccaaatctgagctgccatgactccaggagcaatgatatccagcattaaaaatggaggtagcattcgtttataacagaaaatcaacagcacaattaagccggcaattaaaccaccataaatcgcaatcccaccattccaaatcgcaataatttgctcgggatgctgtgaataataaccccattcaaaaatcacataataaatacgtgcgccaacataccctaacggtactgcccacaatagcaaatcgacaaaatcatctggaataatttgacgtttttttccttcgttaatcgccatccagcaagctaacataatggctactgccataatgatgccataccatttgacacttaaattccctaaatgaaaggccaccggattaattactaaattagtcattatgcggcaccttattcgtatcttcttttgagtgctctgaaatcagactagtcaaattattatcaaaagtttgagttgcatcatagcccatcttcttagctctgaagttcatcgctgcaacttcaataataatttcaatattgcgtccaaccttaactggaatattaacctgtggaattggtacattgcagatttcacgcgtattttcttgaaaacctaggcgatcataattagcttttggatcccaattaaccaaattaattaccagttggatttctgttctattttttacggcaccggcaccaaataaattcatcacatcaataatgccaattcctctgatctccattaagtgctttaagatctttggtgcttcacccacaacggtattatggtctttttgaaaagcatctactcgatcatccgcaattaatctgtgtcctctttgaactaatcccaaagcagtttcagacttaccaacaccagatgcaccagttaacagcacacccatccctttgatttcaaccaaaacaccatgaatgctggttcttttggctaaacgagcacgcaagtattcagttaaaatactggatatgtaggtagttgactctcttgtacgcaaaattgggattttgtgttcctctgctgccgtagttaattcttccggtacaggcaaagagcgagaaatcaaaaaacacggtgtagccttagtacacattttgttaaagacatgcattctaatatcatggtccaagcgtgccgcatatgaaatttctgtccgacccaataattgaattcgttgcgcaggataaaaatcaaaataaccagttaattctaatccagggcgataaatatcagaaacataaatttcttcatctttgatatattcctgtccttggtaaacttcaaggatactctgattgtcctggatcaatttgcttaatctaacttcatcagccatattaggcctcctaactatttatcaatatctttagtggtgacatttctagctttttttcttggtctaggaccagaagtactagtagccttaaaccactcacgataacttccactacttggcatattatcttgatttttccttccagtaaaccgataaataagccaaatgattaaaatcgcaattacagctactggtaaaagtaaaataaatgccttaaatagaacaaacaataaacttaaaataattagcgctactaaaacaagcgttacaatttccattaaactcattttttaacctaatctggattctcttgactaagcaaccactgtaaataggaataaataaacggttgcaattttccgtccattactccttgagcgtcagctgtttcatgacctgtccgcaaatctttcactaggttgtaaggatggaaaacatatgacctaatttgtgatccccagccaatctccttttgatcgcctttcagagcctgcttttgcttacgctttttttcttcttctaagtgaaaaagctttgctcttaattcattcatcgcagtttcacggttttgcaattgtgaacgctgtgcctgagacgtagtcacaattcctgttggtaagtgcgtaattctaacggcactagaagttttattaatatgctgcccaccagcaccactagagcggtaaacatcaacccgtaaatccttaggatcaatatcaatttgaatactgtcatcaacttctggaatcacttctacagaagcaaatgatgtatgccgtcttttagccgcatcaaatggcgaaattctaaccaaacgatggacaccattttctgatttaagcattccgtaagcatttttacctacaattcgcgcactaacgctcttcaacccagcttcttcaccaggctcataatcgttgatttcaaatttaaaaccagctgtatcacaataacgttgatacattcttagaagcatctgtccccagtccatcgcttctgtaccgccagcaccagggtgaatttccatcaaagcattatggctatcatacttacccgacaagagcaggtctaactcataattatgaaaatcttcttgcagcgtagctagatccgcttcaacttctttttgcaagtcaggatctggttcttcacgcaaaagttcaaccgcagtagtttcgtcttcgtagctagtttgcaattttaaaaatgaatcacgtttttcctttaatcggttggtttcactaattaatttttgcgctttttcctggttattccaaaaatcaggctgcgccatcttgttttcattaatttcgatgctttcatcaatcgcatctaagtcaaagagaccccctaaagtgatttagacgtttttttagttcatctaacacactttgaatttcactaatttccatttttacctaccatcttttattttattgcaaaaaaagggaagctcttaactcccctttttctttattaacgactaagattttgtctaatttcagccttcatgaacaaacgagttacatcaaattcaatatttgaaatcatttcttcaaacattctgtaaccagaatcttgatattcaactaatgggttcaattgaccgtatccacgaagaccaattgattgacgcaactgatccattgcatcaatatgatcagtccaacgatcatcaaccacacgcaagataactaccttttcaaattcaagcatttggctaggatcgcctaaggccttttccttatcttcgaagttttgctcaacaatgtcataaagcttcttcttcaaatcttcaacactaatagtcttgaagtcaattgagtcagttaccttgtctgaagtcaaacttgaggaaatgaaatcgcgtaatgagtcaagacgccattccttgcgttcaccttgagtaaacattgctacttggtgatcaattgttctgtgaatcattggaattaaaacattcttcaatgacttatcagcttcaatgacctgcattctttcgccgtagataatttcacgttgaatacgcataacatcatcgtattgcaaagtttgcttacgagtatcatagttattaccttcaacacgtttttgagcagattcaacttggcgagtaatcaagcgactttcgataaccttatcatcatcattatctgataaacgatccaagaagtccttaactcgatcaccaccaaaacgcttcatcaaatcatcttcaagcgacaagtagaatctggtgtaacctgggtcaccctgacgaccagaacgaccacgaagctggttatcaatacgacgtgattcgtgacgttcagtaccaataactgccagtccaccaagttctttaacaccaggcccaagcttaatatcagtaccacgaccggccatgttagtagcgatagttacggcaccacgttgaccagcgttcatgatgatttgagcttccttagcgtggttcttagcgttcaaaactgcgtgaggaatacctgctttatcaagcatcttactcaaacgttctgaactttcaatggcaacagtaccaaccaaaacaggttgaccattagcgtgacgcttcttaatttcttcaactacagcgtggaacttagagtccaaagttggatacaaaatgtctggcatgtcttttctggcaattggacggttagtaggaatcgtgattacctgcatgttgtaaatttcacggaattcttcctcttcagtcttagcagtaccagtcatacctgacaacttcttgtacattctgaagaagttctggtaggtaatagtagcttgcgttcttgattcttcttgaatcttaacgccttccttagcttcaatagcttggtgcaagccatctgagtaacgacggccttccattacacgaccagtgaatgagtcaacgatcaaaacttcgccatcttgaacaacgtagtcgatatccttaagcatgatgtagttggcacgaagagcttggtcaatgtggtgaaccaacttttggttttcaacatcgtacaagttctttaggccaaagtgttgacaagccttttcaataccagttctggtaagtgaaatagtcttagttggccagtcaatcttgtaatcgccgtgatcttcatcatcgtcggcatcatcatcgctcttgtcttcagtcaaagtcttaacaaagcggtcagcacggatgtaatcactgtttgcttgttcagcttcaccagaaataatcaaaggagttctagcttcatcgattaagatagagtcaacttcgtcgatgatagcgtagttcaatggacgttgtaccatttgttccttgtaaacaaccatgttgtcacgcaaatagtcaaagccaagttctgagttagttgagtaagtaacatcacagttgtaagctgcacgcttttcgtctggtgacattgagttcaagttcaaaccaacagttaagccaagccacttgtaaagttgacccatttcttcttcgtcacgacttgaaaggtattcgttaacagtaacaacgtgtacacccttgccttcaagtgcgttcaagtatactggcatggttgctgtcaaagtcttaccttcaccagtcatcatttcggcgatgttaccgtagtgaagtgcaataccacccaaaatttgtacgtggaatgggtaaagtcctaatacacgcttagcaccttcacgagcaactgcgaatgcttctggtaaaagatcatccaaactttcgcccttctttaaacggtcacgaaattctggtgtctttgcttgcaattgttcatcagatagcttgctcatttcatctgcatgagcttctaccttagctgcgattttttcaaatttcttaagttctcttttatcgtcgttatatagtttctttaaaatatttaccattaaatcggtccttatatgtcgtaaagtctaaaaatacagaataattttaacatgtttatcagcaaaataaaaatattctaaacaaaaaaccccacgctcaaacaaacgcgaggttttgaattaacgagtattttaactcaattattcgttagtttcaattaagccgtaacgaccatcgtttctacggtaaacaacgctagtgccgttagtttctgcatcttcaaaaacgaagaagtcatgttccaacatgtccatttgtaaaatagcttcttctggatccattggctttaagcttacacgcttgttacgaacaatatcaaattcgctaggcttcttttcttcttcttcaggttgttctacaaagaaatcttgtaatcccttttcacgactctttctatttacacgagtcttgtactttctaatttgacgttcgagtttttcagaaacgaagtcaatgctacgatacatatcatccgtggtttcttcggctctcaaaactaagtatggtaaaggaatagtaacttcaactttagctgagtgatcacggtatactctcaagtttacgtgtgcaatcacatcttgattcaattcgaagtacttctctaacttgtttaaccgcttttctacataacttctcaaagcatcagttacttcaatattttctccacgaacattgtactttaacatataagattctcctttcaccgctatgcggtttttctttacaaatttattataccaaaaaatgtaagcgtttcataacaaatctaatgacaaattgaaaagctttcaattttcatttcgggaaaaccctgctgtaaacggtcccgcgcgtgatatagcgtgcgcccggtcgtgtaaatatcatccaaaattaatacttttcctgaaactatattttccttgattttaatatttttatcaatcaaaaagctttgaggcgttttaagccgctcctctttgtttttctcaccttgggcatgactacccgattgtttaatcagaagcggtgtcagcggcaaaatatcagcataaatagcaaaaattgtatcaaactgtcgtcttgattgatgttcaggtgaagtgggcacgggcacataaaagtcatagttagttttacacaaatagtcataacacaaatcttgcaatacttcccgcaaaacataatctccacgccgcttatacgcaaccatcaagtcatgaaaagcagaattataacgatataaagcatgattatgcagaatattttcgccataaatggcttgccaatttcgacaatcgctacacataaagccttgacctagttccttatcacagccagagcagcgattgtctgctaacttttcaaattgttttaaacattgcaagcaaattttactttttcgcgctgttttaaaagaaaaaagttgtgcaaattgtaccggtggagtaaactcctgctcacataataaacaagttctcatctattcatccccttgatctgcttaatactctgtcgaatattcttggtataacgatgataacaatacaaaactaagcccgtttggtcatcgtgagcccgaccaactcgacctgcaatttgcaccaaactagcagcggtataaattgcatcatctgctgcaataataattacccaaacatttttaaaagttacaccacgctctaaaattgtggttgtcaacaataagtcatatttacgatcacgaaaagcctgtactttttctaatcgttgcggatcttgtgcatgaacaccggccaatttaattttattttgcaactttttccgcaaagcttcttgataaagcggaatttcttcaatccgtggtacaaacaaaagcaaaggatgaccactttgaatgacttttttaatctcctgcattaatttaggatgaatttgtcccttccgcaaaaacggcctgataaaaagcctttctcttggtacaggcaataatccaccatgaaaacgccgatttaagcgcaaaatttctaacttccctgttttagcttccaaaagcaaatcgttcgttggcgttgcggttaaatacattcgagtcccagttgttttaaccgcatttttggccgcaaaatgtagttgcggattacctacataaggaaaagagtctacctcatcaattaccaataaatcaaaggcacgataaaacttcattaattggtgtgtagtacaaattgtcaactgctctagccctatttccttaaattcacggccatgatacttaccgatctcaacttgggcaaacgctgccgaaaatcttggaaacagctcatttaccacatcaattcttggtgtagcaatacaagcgcgctgtccttttttcatacatcgagcaatcaactgaaacaacatctcagttttacccgccccagttacagcatgaaccaatgtattttttctttgttcaaaattttgtactaatttatccgaaatattctgctgcaatggggttagtttaccttgccagcttaatcccccgtttttaacatgagaaaaagtattattactgtcttttctaataagccaatcgccctcatttgcacgtcccaagccaatacaaccacgacaataatatttaccattaggcagtcgactattaacttggctgccacagcgattgcatttacctttttcaattactggaattttgcggcatccctcaaatgtgctagaatcctcttgactaacaatccattgacgacctgataatagagtcaaatcttccatatttttacctccctattatctattacgcaaaaagaggcgattattttgtcagaaaaggaaaattttttaactattaaagaaaacggcaccggtgaattaattatcaaaaagagcagattcattgccaatattgcccgcaccactactactgatgcggcaaatgattttattcaaaaaatctctaaaaaatatcgcgatgcttcgcacaatacctttgcctacacgatcggcttaaatgacgaccaggtcaaagaaagcgataatggtgagccatcaggtacggctggtgttcctgaattaaaagcattgcaattaatgaatttaaaaaacgttacagtcgtagtaacccgttattttggtggaatcaaattaggagcaggcggtttaattcgtgcctattccaatagtgtcaccaatgttgttgaaaaagtcggcgtcattaaacgcgttttacaacaagaattaatttttagcgtaccctataaccgcttcgatgaagttgatcattacctaaaacagcaaaaaatttttattgccaataccgaatacggtgtggatgttaaaattcatatttttgttaacgatgaccaacaagctaaacctaaggaagacctaactaatttattggccggacaggttacctttactaatggtgaaaaacgctataatgaaattcctgttgaagctaataattatcatgaacaataaaaagagcatttggatatttccaaatgcttttttgctacttattattttttttactcttcaattgatctggtttttcgtctcctaagtgccaaacttcaattgttggatcagttttactcttttgattaataattttctgaattacatgcatcaaaggatggtatttttcacccaataaaccaattgattccacaaaatactctaaggcaatcagcaagcctaagatcagaagccaagtgccccaagttggcgaaagcaggaataataaagaaataaatgagaaaaccaatgataatgcgtaaatagtcaataccgtctgtcggtgcgttaaccccattcgcatcagctggtgatgtaaatgatgcttgtctgcttctgaaattggctttttgtttagctttctccgaatcattgcataaacggtgtcagtaataggcactcccaaaatgataattgggaccaacaatgaaataaaagttacattctttaaccccttcagagataaaacggcgatcataaaaccaatataaagtgcacccgtatcacccaagaaaatttttgctggatggaaattatatggtaaaaagcccaataaacaggcagctaacataaaacaagcaattgggacatatagctgatgagtgtgcaagaagaaataacctacgatccccatggtagtcagagagatcattgaaaccccatcagctagcccatcaagtccatcaatcaagttaactgcattagttaaagctaagatccaaaaaatagtaattgggaaactccaccaacctagatttacttcatgtgcgatgaatggcacctttaacacattcattctgattccagctaaaaagtagataatcaatgaagcgataaaaatcccaaacattttttgtctaggttttaactccaaaatatcgtcgatcaatcccgtcaaaacaattacgcttgaagcgagtaaaatcgaaaaaatttcatgagtcggaaattgctcacgcaacagaacaaaagtaccgatattaaaagtaacaaaaatccccagtccaccaatcgttggcattggtttcttattaactcgccgggcattaggattatcaacagctcctaagacaaaggcaagccgtcgaataaacggtgtaattgccgctgaaataattactaataagaataattcaacaataattttaaacatatttggctactttccttatttacttgttctaattatacaagtagtcagtattttgcacaaatagcaaaaaagtttggaaaaattatcttccaaactttttaatttatttagcgatcgccacaactcttttttcacggataacggtaatcttaatattacctggataatcaagttctttttcaacctgattacgaatatcacgtgccaaaataactgtccgatcatctgaaatttcgtcaggttcaaccatcacacgaacttcacgtcccgcttgaattgcataagcctgcttaacgccttggtagctcttagcaatcttttccaattcggtcaaacgtctaatataattttccaaactctcgcttcttgcaccaggacgagcactagaaatcgtatctgctgcaacaacaagttcagcaataaacgacaacttaggcacatcgccgtggtgtgcagcaatcgcatttactacaacatctggttcatgatatttacgagttagttcaaccccaatttctacatgggaaccttcaatatcatgatcgatggctttaccaatatcgtgtaataaccccgcgcgaactgctaatttttcatccaagcctaattctgcagccatcgtgcctgctagcttaccaacttcaattgaatgtgacaaaacattttgtccataagaagtacgatatttaagacgacctagcgtcttaactaattcaggattcatccggtgaattcccagctccatcaaagcactttcacctgcttcatagatgtcatcgttaacttcttttctggccttatcgaccatttcttcaattctagctgggtgaatgcggccatccttgattaagcgttccatcgctcttttggcaatttcacgtctaattggatcaaaaccactcaaggtaacaacctttggcgtatcatcaataattagatctattccagtcaaagcttcaaatgaacggatattgcgtccttcacgaccaataatccgtcccttcatctcttcatttggtagatcaacaacagatacagttgtttcggcaactgtatctgccgcgctactttgaatagcatccacaatgacctgattagcataatgatcagctttagcttttacttcttcgttactatttctgatcatctcggctcgttctttgactagttcatcagataattgactaagcacaatcttcttggcttcttcctcatccaacttagctacgtcataaagcttttgccgtctagtttctactaattcttcagcctcagttaattttgcctttaagctagcatactgctgctttaattggtcttccttttgcgtgagtccactttcacgttcatctaataaagaattcttatgatctaaggtatcttcacgttgttgtaaacgatttttctcccgagctaaattatctttcttggaatttaactcatcctcggtcttttgcctaaaatcacgaatttgttcttgagcttcaagaattttttcttttttagtattttctgcactttgcttaacagccgctgctgcttgcttttgtgcattaacttcagcttgtgctgcagcaacctgtgccttagcatcagctaaaatgtggtcagcatcattctgggcattttgagctttttgttcccaagaatgcttgcgaattgcataaccaaccactgaacccaccaagaatgaaacaatggcagttgcgacgggaatcataattgttaacatattattcatgattactatcgccttttttagaattattcacacaacttttatgataaagaacctatctgttcatgtcaattaaatcaaaaaaccttggaaaataaatccagggtttttgacataattatttagcttgttcagactttttatctgtagcagcttctttttctgtcttggcttcttcgcgcttctccttgatcttttctggatcttcacgatcagcaattgacttttcatcaatcccgtaagcttgacgcacttgcttttggatatcttgataaatatctggatgctcttctagatacttcttagcattctcacgtccctgaccaattcgatcactcttgtaagagtaccaagaacctgctttatcgataatgtccttatcagcagccatgtccagtaattcaccactttgtgaaattcccttaccgtacataatgtctacttctgccaccttaaatggtggagcaaccttgttcttaacaactttaattttaactctgttaccaagaacatctcctgattgcttaatctgttcagctcttcttacttccaatctaatagttgagtaaaacttaagagcacgaccacctggggtagtttcaggattaccaaacattaccccaactttttcacgaatctggttaataaagatggcaatagttttggttttagaaatattacctgataacttacgcaaagcttgactcattaatctcgcttgtaaaccaacatgggcatctcccatctcgccttcaatttctgctcgtggtactaaggcagcaacagagtcgactactacaatgtcaattgccccactggaaatcaaagtatcagcgatttgcaaaccttcttcaccagtattaggttgtgacaaaattagtgaatcaatatctacacctaaagcttcagcgtaagcaggatccattgcattttcggcatcaatatatgctgcagtaccaccacgcttttgcacctcagctacagcatgaagggctaccgtagtcttaccagatgattctgggccataaacttcaataatacgaccacgaggatatccacctacaccgatagcagcatctaaagctaatgaacctgttggcactgttgaaatttgcgtatcagctttttcgcccatccgcattacagcacccttaccgaaattcttttcgatttttttaagcgctgcatctaaagcagcctgtttttcgtctttggccattaatgtcctcctatttttcgtacctaataattatactttgaccgccgtccaatttgcaagagaaatgcaaacaaacgttcaaaggattttttaccctctattatttattacgctaaaaatcgccattatttttttacaaaataaaaaaagaagcaaatgcttctttttaatcattcttgacttaatactattttacattgagcccttgaatacgccccatgattggtggaagtaatcgtaacctgagtaaatagtaaagatcaacgcaaggtaaagtaagatagtaccaatgtggaagaagtcaccaatcaataagaaaatgattgataacatttggcaagtagtcttaattttaccaggcatctttgctgctaaaacttgtccttcattttctgctaagatcaaacgcaaaccagtaacagccaattcacgacaaacgatgatagctactacccatgctggagcaagtttcaattcaactaagaaaatgaaagcagtcatagttaacatcttatcagctaatggatcagcaaacttaccaaaattggttaccatattacgtgaacgcgcaatgtgaccgtcaaaccaatcagtagccgaagcaacagcaaaaacgatagcagcaataacacgactccaaacaacagttgagcctgctgcttgaacactagcattcccaccaaaaatgatgattaacataaatactggaatcaaaaagattctaaaaacagtaagtttattaggtaaattcattctaacactcctagattttaattgttgttattatttccaccatcattgccattgttagtgtctgctgatgattgagtagtagatgattgttgagtttgactactttgttgggtttgttggctactttgagtagtagtagatgattgttgacgactgctttgacgagtagcactgctttgagtagttgtacggctttgggtagaactactattggttgtattgttattagtagagcccgtattattagaactactattattttgactagtagttcccttagccttaccaatcaacaaagtaattgtcctgtacgcattgtttgctgtatatgggattttcttacctgcaatagtgattgaagtaccattatcgttgcctaaagtaatcactactctctctgcattgcttggcaaagtcatagtgtgcttttgattagcaagtaaagttgattgccagctattagcattaccattgacttgtacacccgctgaaatattttggttttcaccagcacgcacaactaggcgacggtttttattcaagccagtaactcggtactcattgtcactaaccttagtaaccttaactttattgactactacttttttagctttcttagaagatgacgatgatgacttttgtgatgaaacagttacatcattattatcagcttggttcttttgaccacctgaagaaagacgagcatacaaaacgtacactacaagaattacgataattacaccaagtccgatcgcaattcgtggcaagtaattcttccacaaatttttcttattgtcggtggtttctcgtacttcttcactcttattatcaatcgagttttctacgtactcatctggcttagcttctggtacatcatcgtggtaatcacttaataactccttaccatccaagccaacaacttgtgcatattgacgaataaatgctctaacataaaaatcgcctggaagtttatcaaattcattcttctcaatcgcttcaagatatctgctctgaattttagtagctttttcaatatctgcaattgaaagtcccttagcctctctggcgctctttaatttatctccgatatctgccatatttacctcttcaaattttaatttatcatgttgagtataccataaaattctcattacaacgtcttagttataaaagccatccacctgtaacataaattgtctgtcctgttaaataactactacgtcgatctagcagtgttctaacccagtatgaaatatcactgccattggcccaacgaccaactgggatttcatcttttacctcttgaatcgtatcctcagaaaagaatgcattcattttggttttaaccgcaccaggcgcaattacattaaccgttaagttattggaagcaacttcacgcgcataagcctgagcgaacctggttataccacctttagttgcactatagacgctttctaatgcactacctgcaccaccatagactgagcctaaataaactatacgactaaaatctcgtttcatcagttgtggctctaacaatttagttaacttaattggcacagtaagattaatattaatcagatcagtgatatttgctaatttttcatcacctaaaaaaccatacttagtaattccttgagcaaaaactactgcattaactggcaacaagtttttaacaaaatctgttaactgtgcatcccctgtcgcaaaatccaactgtagcgacataaaatcctggtcaggatgcttagcaaacagctcttgaactaaattttcagctttttgagaattagaatgataatgcaagtataatgaccaaccggcatctgccaaatctcgacaaatatcttgaccaataccgccagttgcaccaaagacaattgctcgcttcaactttatcaaccccttacttgttttctaagtaagcagaacaaagttcactgtctttcataatcttttggcagtagtcataaaactgatcaaaattcatcgcctgcaatttagctatattttgtgttaaattttcatgatctaaattttcttcaattaattcaattgccaaataagacagatcattacttgtcctagcagtgcgtgctaaccattctttcttttgcaaaatgaagttttgtctaataaaacggtattccgctgaatttttcttaattggttccgtcaataccctctttatttctgcaattacttcttgagcttgaggacttacaccaaaaatagtagcaaaatcgccctgcctggtgtaattaacagaaatctgcagcgaatccattaacaactgcttttttctcatttcttcaaaccatggtcccattgcacttagttttgattctaacattatttctaacagaatttgagtcaaatcaaagcttaataatactttcttaaagtttttaaagcgaattcctaaaccaaaggaattagaattacctctggctggcaagacttgatcatgtaacatgcgaaaactaacttgtttttcagctgtgcttttacctttcccgtgcaaatatttttgctgcagctttcctacttgccgcaaaatcgtttgcacttgattatcagaaaaatcaccgcaagcaacaaattgcatcttttctggcacatacttagcctcataaacttgggtcaagtttttcactgtaacttgattaattgattctttcgtacctacaacttcgatccctagattagaatcaccaaacatatcatgcataatcgcattatttacgctccaagttgggtcatcctgatacatggccaattcttgttcaataatcggagcctcttgcgcgatattttccttagtaaaatacggctgccctaccaattcaaacaagagatcgatcattttaggcgtatgctcaattccactacaataaaacattgtttcattaaaagacgtgaatgcattaacgtcagcaccaatatcttcaaattgcgttgacaaatcaccatcttttttggcaaatagcttatgctctaagaaatgagccgaaccggcaaccttttgtggatcactactaccaaagtcaacaattataccgaaaaatcgttgataaaaatgtggctttaaaataatttcggctttaaagcctgactgatattcttttttgataatttttggtgtcatcattttaaaacataactttcattaaagaataaattttgtgcgaaagctactaactgcttaggtgtagctctcctaattgcattttcacgatcaaagtctaaatatcccgagaacaattcatcacgcaacatttgacccatctgccagttttgaccgtctagaccaatcttcatattacgcaaaattgcctttttagcctttttaaataaatcatcttctacttcgccctgaactagtttacccatttcggataaaataatttttcgagccgctgcaatcttactaggatcaagtcctgcactgactaaaaacaaagaattattggcaaagcagcttgcttcaacattataagctgctcccaattgctcccgaatttgcgtaaataatttagatgattgatcacctgccaaatattgcgataataatattcccattacttgaccgcgataatcaatactttgttctaaaccaaagcccattaacaattgagcttgcacatttccttgatcatcctctttttcaatcaactttcttttagctggaatagttagactagctgtttgaaatgatttagttaaaccagtttgttgaaacatagcctgagctaatttagaaaccagattattatccctggtcattcctaaaatttgcattggtacattagctaaattacgccaataatgcatcatagtcgtgctagtcgcagctttgatttcatctagtgagccaataaatgtctccgcataatcaggttgatcctgataccacaatttaaaaaactgctccaacgcataattagatggttgttcaatcagttcttgatattcttctgctaattgacgtttagcatattccaccaaaggttccgcaaaattaggttgattaactatttgtgcaatcacattaagaatttcttcatacgtataatgtggatccaaaatctcaatcggctcaacaaaattggcataataagtcaaaagtatttctttaccaaaaacttgtggcataatctccagctgtaaatcatataattctgccaatcttttttgttgtaaagcaagtgacggataacttaagctgctattcatctgtattcgcgctagcaaactagcataagctaaattatgtttagtcagcggcaaacgcaaaaaacagccaatagcggctgttgtaaactttttattttttctaattgcaatattagttgtgagcattgtttgaattaccttcattctttattggtggcactaaaacttgtcgtggcttagagccttcagatggaccaacaatccctttagcttccatttcatcaacaattctagcagcacgattataaccaattctaaacctacgctgcaacattgacacgctggccgtctgttgacgtcgtactaaatcaacagcttgctcatagaattcatctgctggctcatcatctttactatcagcatttgatgaattttcaccttttttaggaatcattgtctcatcataactaacctcttgttgcttcttaacccattcaattacgcgttcaacttcatcactagcaatataagcaccttgaacacgttcaggtttagatgccccaattggcatataaagcatatcaccacgaccaagtaatttttctgcacctgtttgatccaaaatagtccttgaatccactccacttgatacagcaaaggaaattctcgatggtacatttgctttaatcaaaccagtaataacatcaacacttggacgctgagttgccaaaatcatatgaattccggcagcacgtgccatttgtcctaaacgaacaatcgcgccttcaacatcgtgaccaccaaccatcatcaaatcactaagttcgtcaactacaactagaatataaggtaacggcttcatcactggtttagttttatcacgattgttttcagcaactttttgattatattcactcatgtttcgcacgccaccagccgcaaatagcttatatctgcgctccatttctttaacaactttgcgcagtgcatttgcggctagcttagcatcggtcaccacagggatcaataaatgcggcacaccattataaactgaaagttcgaccatcttggggtcaattaaaactaatttaacttcttcaggccgcgccttcattaaaatactggctaaaattgtattaatcgctacggacttaccagaaccagttgaaccagcaatcaataggtgtggcatcttagctaagttggcagaaataatgcttccagttacatctttacccaatggtacatccatcggatcgcttttggctttattatcttgatgttccatcacgtctttgaatgaaacaacagacgttgctcggttaggtacctcaattccgataaagggcttaccaggaattggtgcttcaattcgaatatctttagccgcaagcgccaaagccaaatcatccgctaagtttacaattcgacttaccttaacgccaacagctggctggacttcataacgcgtaatagttggtcctaaaatagcttttttaataatcaccttaacgccaaaactcttaaacgttgattgcaaaacttgggtatttttcttaattaaatcacggtcagtactctgatcagtcgatttaattggatcaagtaagcttaaaggtggcatcttataagctttattgactggcgcatcagtttttagttcaccatgatcgacatcggctaattcctgctttaacttttgatcatcttccgcaaaagaatgtgacttaggtagttcctttaccccgtcatcatgttgtggtgcaatttgaatttgcggttctggatcaggtgtggtctctggctcaacttctacgtcttcagccgtcggcgttacatcgtcatcagttggatcggcagggtcaaagtctgctacattaggaaaaatcggtttatcgtcatcaactaaatcttcgtcttgttcctcttttttctgacgccgcttttccaaaacgtcattatatttatctttgacctttaccccagcttctttattctttttgatgaataattgactaactgtctggaatttttcgataattgttctaaatttaacatcaaaaaacatcaaaattccaattggcagcaataaaatagcaaaaacacggacaccgatttgccctagtagtggataaaaaagttgataagctaatgaaccaattaatccaccaccaatgctctcagtgactccagcacgaccaaactccgcggccattgcatgccaaaaagaattcaggaaattactgttaactaattcatgttcaaaatacaagttacattgaattaacagaattcccaaaaaagcgattgctaaccccaagctacgcttaattgttaagtgaatcggttgattatagattaaatttactaggccaaaaagtcccagtaaacctgccgcaaacaaataagaatccccgaagaacattcgaatcaaatttgcgatttgcttacccaaaataccgaaacggacaaaagccagccccgctattaaaatcaagactaaaccacaaatactccaattaagattttgctttttgtttgcttttcgcttattgtagctctttttggcctttctttgtttcttttttgcaggcatgtactcacctgattaattatcgaattcagccttgaagttcaagttaaccggctgacccaaagttaattgggttgtttcatagatcaaggtctcaagttgctcaactaatggtcgagttagtaactgccaatctgaattactaatgtcagagccatcaccatggtaatcttttaattgcacgatttgatgaatcaagccgcttgcttcaaacatagctggtgcaggaattacatcatattgaatagcaacatcatagtaactaccattttcttctgaatgctcatcgtcaccgctaacatctaattttctaattcctggtctaacgtcactaattggtttggtatcttcatcaactaaatcataatgaaatgcctgtacgataatatctgtctgtttttcaaaatccattatttattctcccctagattacgttcatatctttcaggacgatcatagtcatcttttaacttgtcattttcataatgatgggttgtttccatattaggaaaaccttgctggcgtaaagcttctagcaaaaccattgctacagaattagacaagttataacaccgaatgttatcagacattgggatacgtaaattacggtcatagtattcacgcataaaagtttctggcaaaccagttgtttctttaccaaaaacaaagtaataattcttgttaggatcagtataatcgacttgtgcataattttttgatgagaatttagaaattaaatacatctcatcattaggccctaaagtcttcaaaaaggcattcaagtcatcatgtctgcgtacatcgaccttatcccaataatcaagacctgctcgcttcatttttttattatcgatttgaaaaccaagtggttcaatcaaatcaaggacagtgttagtccccgcacaagtacgagcaatattgccagtattagctggcatcaatggttcatacaaaactacatgattagtcattcaaaaaactccttatcaaaaaaagcgtagcttttaagccacgctttaaaactatctagtatttattcgctttcgtcatgatctgcatcccccgtggtcgaagaaacagcattctcttcaaagagtttagactctcttcgataataattgtacacgcgagacacaataatcttcaagatcgcataaattggaataccgaaaactacaccccataagccccagacggcactagcaccaatcaagagtaaaattgttgtaattgggtgcatttccattttattccccattacccatgggctaagaattcttgattcaattgtttgttcaatagcaaaaacaattaagaccttaattaacattgaacctgaagtcataattgaaattacaattacaggaatcattgctaatggtgtaccaaagtatgggattaagttcataaacccagctaaaattgccaaagccacgccatatggtaaaccaattagaatgtaacccaatgagaacatcacacctacccaaaaggcaacagtaatttgaccacggacatatgaagcaacagcatagttaatatcatataataatttgctaaaactaggttgccatttttcaggtgcaaacttggtaatatatggccgcagttgatgaccatcttttaacatgaagaataaaataaacggtgcagttaacaaagtcatagccaccattgtaataatgctgacggcagatgaaatattgccgatagttgcattgatggtactttgtccagacttaaataaggtcttctgcgtattatcaatcatgcctttgatactgcctttaaatgaatgtaaacgcggatcttgcaacgcattttgtgttgcattaaccgcatcattccaaatatgaggccagttctttatcaatgaattaatctgattctgtgcaattggaaccaagatattaataatccaaattaatgcgacaactactagtaagaataaaactataattgtcaccactcgcggaatcttaaattttctttcacaccaatcaacaaccggattcatgatatagtactgaattaccgctaataataatggcggtaaaattgcactaaagaagatccaggcaggattcaatacaaaagatactttattaaagacccaaataattaaaaagaatagcaggacgtttaataaaacaatactaaaacgattatctaagaaccattttttaaaaacagttccacccctatgttggttattttccatctattcatcctaatttttaaatgtgttcataaacaatatcatcatcaaccttaaaattaggtaatggttgatcaatatccggatcaaagtagatcgcattagcaagtggcgtcttagaaacgggacggttaaagaacaaggttgcgtgtcccaatgccttcatgttgctctctaccatcggaccaacatagtttgcaacataggtttgaccatcaacagtgattgtatcgccttttttaaaaacaaaaccactaactggcgtctcagtactgaatttttgaatgacagaaacgtcttccaaatccttattagcaccctcgccaaataaaattaccatgccatctttattatcgacggcctttttaccaatttttttaatatttgcaatccatttcataatataatctctccttaaaaataattttagcataagaaaagctgcttaaaaacttaagcagcccaaaatcggcgattattttttgctcaacaggaaatcgtgtttttaagcgtctaatccgctttcatgctatactttattttagacttatttttatttagagatggaggcccacacatatgaaggttttaatcggaggttacaccaaaaaaacttccaaagggatttatgaattacctattaccagtgcagcaaatgatgcccgtttaggcaaagctgagaatattattagcgttggtggtccaacttatttccgaaaagatggtaatttaatttttactgttaataacgctggcgataaaggtggaatcagcgtctttcaattaagtgatcaaggcgcaaacgaagttgaccactatttaactccaggctcttcgccagcttatgtaggaattaaccgcaccaaaaagttgatttacactgctaactatcatactgctgtcttgtccgttttccgctacaacgacagtggcaagctcgatctagttgatactgtaactcacaaagctgaaacgttgggtccgcgtcctgaacaagttgacggtcctcaccctcacttctttgatgaaaccccagctggtaacttggttagttgtgatctaggcaatgataccgttgatttttatagattagaaaatgatcaattaaaacacattgctcaatataagtgcgaaactggctttggtacacgtcatatcgtcttcagtaaagatggcaattacttctacgttgtcggtgaactttctagtcaaatcaatgtcgttaaatttaacgaagacacttgggactttgaaaatattgctacttataagacaattcccgctgattttactgaccataacggagctgctgccttatatattagtcaagatggcaaatatgtttacacttccaacaggggacataattcaattgctgtcttcaaagttaacgacgatcatactttgagcctggttcaacgtgtatccacttttggtgacttccctcgtgattttaattgggataaagatcagcgctacgtcgttgtcgctaatcaaaatacagataatgctactctttacacaagaaacgctggtactggtagcctaactcctattcaaaaagaaatttccgtaccagaaggcactcgcgttcttttcaccaaatagtaattagcattagtaccaaagtcatggcgcaatagaacgtcatggcttttttattcctacaacttaaagtaaaatagaaataaatgaaacaaaatataagaaggtgacaaagtgaaaagaaaaataattcgaatattacttttcattcttggcgggatattagggttactacttctgtataaactctatttaaattaccgtcctgaattgaatttattacttcattttgatcaccataatgaagaagtactcgttaacatggtccgtagccatggtattgaagacttagcctttttatttttacttaatgcgatctgtgtagcaattcctggcttatccaacggaatcttttgtgttctcaacggaatcctttatggccctgcctggggatttattgttaattggatcagtgacattttaggccaaataattttaatggaacttttgcaaaaactctatgacatgaaaaagatgtctaacagtaaagtttataagttattgactggattaaaatcaccaatgcttggattaattattggatatatgattccatttattccgagtgcgacagttagctatgtcaacattatgattaataaggagcaacgtaaaaaacagctaataccaatcattatcggtgtcatccccttcgcttacttatatgcttatggtggcgattcaatcttgcacttagacggaacacgattgattaaagttgtaatctcattcgttgtcattgctttaattgcagtagctattttgcttagtctgagagcaatcaaaaagcgtacaaaaaaagcttgaatttactcaagcttttttattatgcctagcatatttaaactaagttagcttcttctaacagttcttcgacccaagttctcttgattttcttcatccctgttttgagagctaacttctcaggtaatggcatctcttgatcaactaatttcttcttgtcagacatgtagtacatcgcacgaagcaattgacgaatatcataaattgagtcaaatacttcaggtacaccacggtcaacgttaagcaatgtataaacagcttccatggcagttctgacagaatattcggtggtaaagacagtgtctctagttggtgattcggcaaaattgccaataaaggcaatattaactgatccttctggaacaacatctggacggtccccatcatgacgaggcataaagtaactagtgatatatggcatgtaaactggtacggtattcatattttcttcactagccaattcgctgatttgactctctggcacgcctaagtgatagagcatttcctcggcaatttctttaccagtacagtcaacgactctcttcttgatgtaattaccctcagtatcagaatacaaagcataaatccaaacaacgatttgatctggattctggctcttaaagtgaggttgacggtgaatagtaaagctaagttcccaattagagtcaacaacagtgataattccaccagtattaactttaccatcgtaaaggctgcgcttagtcaagcgttcaaagtatggagctattttcttattttccaaggtagctgtagctgatacgaaccaactacgctctggcaagttttcacagaagacatctggatgaccaaagtcaggatcttgtttagccaaattttcccataatttccatgaagagcccttgtcgtgagtaattggtgctggggtattttgatcaccataagtagaactttcagtgattgaaccgttagtcacaaagacaatatcatctggggttaaatcaatatcactttgctcaccattcttggtcatcacgatcttcttggcaaccttttgcttgccctcatgatcaacaaccacgttatcaacgtgacaatcatattcaaattgaacaccgtgatcttttaaatatgccaaaagtggcttaaccatggactcatattggttatacttgttaaacttcaatgcggtaaagtcaggcaaaccatcaatatggtgaataaagcgcattgcataacgccgcatttcggctgctgagtgccatttttcaaaggcaaacattgttgcccagtatgtccagaaattagtcttaaagaagtcatcactgaagaattcttcaattgtttcaccttggagttccttttccggtgtcatgattaacttcacgatttcattagtgcacttacctagaccatattgaccatcacttggtaagcgatcaccgcgattataaattagacggcaattggatgagttaggatcttctttatcaagccaataatattcatctaagtatgatgcgccagggatttccaaacttggaatcgatctgtacatatcccacaaacattcaaagtggttctccatttcgcggccgccccgaaccacgaaacctgcattaggacgcttagcaccatcaagtgaaccaccagctacgggtagctcttctaaaatatgaatattttcacccttcatttgtgcatcacgaactaaaaagacagctgcagaaagaccggctaaaccactaccaataatataagcagattttttatctacgcctgcgggctttttggcatccgcaaaagcctcataattaccattggaatagtacataaagatatcctcttttctgtataagtatagtttttaacattacactttaattataaagaaagcggttactagatgcgagttttttagaagttttagctaataactttagaattctttattaattagtttctgccacagttcttgcatatcttttggatcattcaactcaattgttttacatttttgctggctaaatggatccggaaaatttaaataaaagcaatttaaggcttggcgtgaaaacccatcttgaattccatataaaggatcaccatataaggggtgtcccagataagccatgtgaacacggatctgatgggttctaccggtaagcaagcgtaactctaccaagctagcacctgtaacctgatctaggactcgatacgcggtttgagcgtcctttccatctgccactactgcacgtttaactccactaccctttttgccaatcggttgatcaattaaaccagttaactcattcggagcaaaattgccatgtacaattgcatgatattttttgacaaatttctccttgccaattttactaaaacgagcatgggaaattgcatttttccccaccaatactaaaccagatgtatctcgatctaatctagtaataacatgcggcttcaaatttttctgtcctttttgggcaaaataacccaacaatcgattgaccaccgcatcatcatcttcatagcgtgagggaattgacaacacacctgcaggtttgttaactacaagataatttttattctccaacacaattgatactggattattcgatggctttaaaaaatcatttttcttttcttcaccactgataaaaatcacttcatccccagcacgcaaattaaagctagtatatcttcttttatgatttactaaaatcatgccatgatggtgtttagcattgtttaacgcttgatgcgaaaaaccattttttaacaaaaaaggacccagctttttggggtctctttcttgcacaattagtttaaataaactagtcatttttttcattatctccaataaacgcattttgtacgcgtgaccaaaaatgatggtggccaaattgatcaaactgaatcgaatgccgcgaaattcgatattcaatcttcttagcattacgtacatcaattcttgctccatcaactgtcatcacaaaatgatctgcattaggaacaatcgaaatccattgatcaggcgcaatcacaattggtgatgacaaagttctaaaaactcgattattaattgaggcaatttcagtcatttgcaacgcttttagccggggatgaattactgcaccacctagtgatttgccataagcagtcgaacctgttggtgttgaaacgcaaagaccatcgcctcgaaagttttcaaataattgatcattaatgtacacatcggcctctaatgtatgtgaaactcttttaaccgctgattcattgacggctaaatggtaatgagtttcacctgattcagtgagcatctttatttctagtaaaggatacttcgctggttcacccttggttactgctaaagcatcaaccattttttcaatatcatagttacgccaatcagtataaaaacctaagtggccagtatgaatcccaataaagcgcacagaatctacttgattttcatagcggtggaaggcattgatgagggtgccatcaccgccaacagtgatcactacatcaggatatctagcatcaaagataaaacctttttcctgaagcagcttcttaagctgcgcaactgtctttaatgtttcatcatagttattatgcgctattgttactttcataatttttctttgcccttatttttggtaaaaattttctgagcttcttggacctcatccttaattgacgacatttcttcgtctagtctataagcggcttcagccgttgattttaatctagctgaaatgtcatcaggatagacaccttgatatttgtaatttaaagtatgttcgacagtagcccaaaagttcattgccatagttctaatctgaacttccgcaattaattttttcggaccttctggtaagtaaaccgtatagttaatcaccatgtggtatgaccgatatccactcggcttagcattttgaatataatcacgctcctcaacaacttccatatcatctcgagcatgaatcaaatctactaccttataaatatcgtctacaaattgagtaacaatcctaatccctgcaatatcttgcatatcagtctcaatgacatcaggactaattactcgccgtttcattttttccttgatagaatcaactgtctttacccggccaattacaaattcaataggtgaatgttctcccttagttaaaaagccttgtctaagggaacgaaatttaacctttaactcgcgaacagcttcgttataaggccacaagaagttatcccaatctaattccatgagaaaacattcctttcttaagcaaacaaactcattttaccatataattaagttaaacagttcggaggaaaaacagatgagtaaaaatcgagaaattgaagcaaaaactcttttaaataaaagcgtttatgatcagatcactgccgcttttccaatcaaaagtgactttacccaagaaaattattattttgatacagcagatgatttattaaaaaatcatcaaattagcttgcgtattcgaatctatgctactcacgcagagcaaacaatgaaggtaccggatcctaatcctgtacaaaagaatttccatgaagtaattgaaattaatgatgaattaactcacgctcaagctaaaaaattagtagcaaaaaagcattttaaattcactggtaatattggcgcatatctagataatcattttgccaatgaccaaaaaaagctacatcttttcacctggagcaaaacccgcagaattttgatgaacgggccacaaaactgtgaattaactctagatgctacgtcttatccagataactatcaagattttgaattagaaatcgaaaatactaatcctgctttaattcaaacagtattaactaaacttgaacaagaatatgactttgaacaaacggctgctaacactaatcaaagcaaaatagctcgtgcaagcgctcaccaaaaatagtatatagaaaataaggcatattttttgtcacttattttttttcttgctaaagtaactaatagtaaatcaccaaagaggtcgagattatgtttgagatttttctattcatcaatccaatagggatttattgttatgacactgaaaaacagattcgtaaaaccgttgatgaattaggggtcgacgtttgttatcactatattcccattgcaaatgtttgtttaatcaatgatgatgcgattcgccgacgcaaagatgaccagaagttgcctgatattagtaatttttctagagcaacttatgaagcattagaaaattaccacgcgattaggctggcctatggcaacaaaaaagcccgtcaatacctgtatgaattacaaaaaaacttgagcaaagatgcttcagcttatacacctgagctgcttaagcggatcgcaaacaaattacatatcaaggatgcggatattcaggcaatcaaacaaactgattacctgcgtacttctattgaagaagatcaaaaactagccaaccaatggaatattaaagctactcctaccaccgttatctttaacgaagacaacgagcaaaatggagtattgctagagggaccaatcaatcaacaggatttagttaatctaatgcttccagattgtcaaaagtgtttttcagactatttacctgcggagcatcatttacgccttatctaaaggcgttttatttttgcaaaaaatcactaacccgatctctttcacctgggttacgccaagtagcaaaaactttatcaggtaaatcatcaagagttaatttgcgttcataaagcatctctcctattttcaatcctaactttttttttttgcataatttgctggcgtaaatattttctttgagttgcaatgttcaaagaatattcttttttgaatggcttaaagcgccaaaaatcttttatccccaattcatcaaggacaaatgatttactttgataaaccaatttattagctaccggttcttcgaaaacattatattttaagcaaaaacgatttctctgtggattaatttctaaatagtaattcccccaagctttattttgtcgaaagaaaatcaactgtgtgcgtttcaatcgccgtttcaaatagtgtcgctgtcccacaatccaaatatcttttacaccaattttttgataaagctgatgccgatggttaaattcttgttgactcaacggcgcacattgaacttcaaacgctaacttagcagttgctaagacatctgcacgcaattgtccttcagctaatggaatctcaacttctgccggaaaaccagctgccgtcaaagctgacttcaacagcattttcgattggtgatgctcctctttttcacccattaagttactgtacttcacaagatgcttaaaaaaggctgctttttgctccgacataaccaaaattacttttttattgcaatgtggacagtgataattatcacgattcaatttcttttgccttgcattaactaaacatgcttcgtcaactgcaaggactaatttcttatttaacatggctgcatacatttttctcacccatgttttattacgtaaaaaagagacggaattttgtcccgtctctttttctttaaagaatcttaataattagctgcttttaaaaagtaatgtcgaatctggcctaaagcattttgcatcaataagcatttgcctgtttcttcaactacacgcatcttatcactatcgaccttaaaaccaaattcgttggctattgtccacgcatctgctggtttaagctcctcatattcttcatcaagaaatgccaaatttaagaaatattgtccatgcaagtaatacaagctagaagctaaatcatttgccttaaggttatcagctaattcaattagactacctaaatcatcaaaatagtaagcctgagtcttgcgcgatctccaatcagttggctcattgtttttatcatcttggttaaaaaagttgtgagtagctggtccttgaggagccgaatttgaattcgtactctcctcatctaaatcaaagaaactttttgaatcatccgaattcgttgatgattgctcatccttaggaaagctatcacccattagtttccttaaattctgtgcatcgtccggcttaactttggtgatcatcaaatctaatcccccattattaggcattacttgaaatgatactggatcaccattggcaaattcatggtcttcatcgacctcatcaagaattttatagaagaagtcttgaatcttttgtctattacctaataaatcaagcattcccatcccacgacgagccaattcagctttatcaattcgaactctgatagtattcttatcaatatgatctacctgcacaggatctcacctccatgaattaatatatctattgtagcgtatttttcgtttaaaataaaagtgttagtctcaacaaaagccttaactaacacttttcaatcattttataaatctgcaatcttttgtgcttcagccaattccaaccgacgaacttttcgtggcaagaatcgacgaatttcatcttcattgtaaccaacttgaagtcgacgatcatccataatgattggtcttcttaacaagctaggattcttttctactaaatcaagtaactgatcaattgataaatcgtctaaattgattcgcaattgttgaaaagctcttgagcgggtagaaatgatttcctcagtaccattttcagtcatccgcaagatctttaataattcttttttagtcaatggttcagaaaaaatgtttctttccttgaatggaatattatgtttttcaagccacgctcttgccttgcgacatgaagtacaactaggagagacatataaatctaccataaaaatcacgctcctcagaacaaatatttgtatacgtttctttactcatagctagtataccatataagcttctttttcgtaagtgcttaatttatcgtttacctctgctatttacttaatactaaagataaaacgtgaattatttgtgaagatttcgttcgttttgtttaaaattattaaaaataaaaaaagagacatcacagtctctttttgcaaattaaaactacttgttcaattttttcattaaattattaactaatttttcgttgtcttcagcagtttctgatacataacaagcttcgttagctaattctttaatgtcagcagtgttcaatttcttcattaagcttctgatacgcaaaattgaagttgcactcattgagtattcatcaagtcccattgaaagtaagattgggaacatagtgttatcaccagcagcttcaccacacataccacaccaaataccgttttcatgagcaccatcaatagtgtgcttaatcaaacgaagtactgatgggttatatggttggtacaagtatgacacattatcattaccacggtcagcagccatagtatattgaattaagtcattagtaccaattgagaagaagtcaacttcctttgcaaattgatcagctaaaacggctgcagcaggtacttcaatcatcataccgacttgcaagtcatcaccaatcttaacgccttctttagcgagcttatctttttcttcagctaaaatttgcttagcttcacgtaattctgctaaagtaccgatcattgggaacataattcctaatggaccgtatgcagatgcacgaagtaaagctcttaattgagttctaaagatatccttgtattgcatagaaagacggatagcacgaacacctaagaatgggttcatttcttctggaagatcccagtaatcaaggtgcttgtcaccaccgatatcacaggttctgataatggtttgcttaccattcataccttcaataacttccttgtaggcatcaaattgagcttcttcagttggaaagtcactagagtccatgtacaagaactctgttctgtacaaaccaatggcttccgcaccattatcctttacacctggcatatcattaggtgtaccaatgttagcagcaatgataaatttcttaccatctgcagtaactgatggttcattcttaagcttagcccattctgccttttgcttaatgaatgcttcactcttttgcttgtaatcagctacttgagcgtcacttggatcaataattgcatccccgtcaagaccatcagcaattaacatatcgccgttcttaacatccttagtaattgagtcagtaccaacaacagctggcaattcaagtgaacgagccataatagctgagtgagctgtacgaccaccaatatcagtaacaaaacccttaacatactttttgttaagttgagcagtgtcacttggagttaagtcgtgagctacaacaattacttcatgatcgattgaagcaggatttggtaattccttaccaagaaggtgagccataatacgctttgaaacatcacgtacgtcagcagcacgttcttgcatgtaaggattatctgtcatcccttcaaaaatagcaataaacttcttagcagtctcatcaagagcagcttctgcgttgatctttgaatccttaatttcattctcaatggcaccagtaaattctgggtcatttaaaatcattaagtgtgcttcaaaaacttgagcttcttcatcgcccaagctttctttagcaatatcatgaatcttttcaacttcagcagttgaagtcttaattgcatcgttgtaacgagctacttcagcttcaacatcagcaattgaagatttagagaatgaaagatcaggctccacaagaagatatgctggagcaatagcgataccatcacttgcagcaattccttttaaagtcttggtcattattcagctaaaccttcttttttcatagtgtcggcaattgcgtccaatgcgtccttttcgtcatcaccttcagcagtgatagtaacatcagcattttgaccaacaccaagtgacataacacccatgattgacttcaagtttactgacttaccgttgtattccaagttaacatctgagccaaactttgaagcagcttgtactaaaagagtagctggacgtgcatgaatacctgtttctgcaatgatatgaaaatcgcgtttttccattataaatatctcctttaaattgaaaaattaaactggtaataaatacccattcgagtattagattatcatgtttttacagattagacaactgcaatgtaacagtttacattatttattcatcggtattcgtagcggtatacacaatcgcgccgcctctttctgccctaccggtaatatattgtctttttccataatttctaatagtcttttgaagatcaaacgcatcttttggctcaactttatactcttttatctcgcctgagactaattgatctagaattttctgataatccaaaaatatcaccactcttttaaaattttataatttttccactattaattctactcgtattatataaattaaatcgtattatataaattaaatcagtgataatgattattcttttagtttgtttattcgatcatcagatgctagtctctaattgtcattgaccttggtcaattggtataggttgtttccttctgtagctttgactacttttttagtctgccgcccaagcagttttactaatgacttactcacatgctgtatcgattctggctattactgattcagagcagattcagtcgcagctttttagcttgaacctatgaatacttatattttgcgagattgtcttagaatctgtaattagggactaacatgtgatgatcgatctatgaccaaatatttgctagaaaggaggccattctcaatgaaactttttatcggaattgacgttagttcaaaagatcttcaagtcgctattactgactcagaaaattatcaaaaacctttacttaaccaatctttttctaatgacctgattggtgctaatgaggtcaaaaagataattcttcaacttgctaaacagaacagctatgacaaagtaattatcggcatggaagccacttcaatctatagctttcaccctgcttatttctttgccaatgacgaagatttacaaaaaattaatcttgaaactgatgtcattaatcctaaaaacactaaacgatttcatgacgtttacgaagaaaataagaatgatcctactgatgcctattacatcgctgaatacttacgctttggtaaataccatgtcactattgctcggcaagaggaatacttagctttacagcgtttaactagagctagatatgaaatcacatcttcgctcactagagctaagcagcacttcattgaaactctttattatcgtgtaaacaaactagttaccgttgacaaagacaatattaaaacttctatctttggcgcaacgatgctgtcaattgttactgatagtaaaaccatcgatgaaatcgctgaaatgccaatcgaggatctaattgactaccttcaaaccaaaggacgtggccgcttctctgatccagagactttagctaaagcgatcagaaaagccgttagaggatcatatcgcttaggtaaagtcatgaaagactcgattgatgccgtattatctgtttactatgccgaaattaaaactaatcagaaattgattaagaacttagataaagcaattacagatatcgtccaaacgcttcctgaagagagaatactacaatctattccaggaattgggtcagtttattccgctggtattatcgctgaaatcggcagtattgatcgctttgacactgaagcacagctagctaaatacgctggtctagcttggcgtcaaaagcaatctagtaattttgatagcgaacacaaaccgatgactaaaaacggaaatcattatctaagatattatttggttgaagctgccaacctgattagacaaagagatcccgtttttcggaagtactatcaaaagaaatacgatgaagctttctattctccgcataaacgcgcttgcgttctttgtgcaagaaaattaaccaggaccattttcactctgctcaaaaatggtcaaatctatcaaacaccgaggtgattaattggtctaaaacatttttggaggagtaaataatagttgttaaaaaatcccttgaaatagggcttagtttcatgcacgcaaattttggttttaaaacaaactaattaaaaataaaatttaacttttacattgacttattaccacatgactatttatattcaattttcaaaaatattaatattttgtttgcggtaacaaaagtatttcttacaaaaaataagtgtttgagtcttagcacttgactaccaagagtgctaataatataattttggtacagttgaaaagaaaggcggtactatattttgctttgccaaaattgtcatgagcggcccgcttctattcaccttttcactaaggttaatggccaaagccgcgaaatagatttatgtcaacactgttatcaagaattaaaaaatcaacaaggaaatcaaggaaaaatgaataataatgaattttttggcgactttgatgatttattcaacgcattaaacggaaataacaacaatgccgcaaacaataataatgaaatgagaaataacgaccctagaatgcaaatggggggaggcgctggtaatggtggtcaaaacggcagaagcctacttgaccaatacggaacagacttaactgcccttgctaaaaaaggcaaaattgacccagtaatcggtcgtgataaagagattgctcgggttatcgaaattttaaatagaagaactaagaacaaccctgttttaatcggtgaagcaggtgttggtaagactgccgttgtcgaaggcttagctcaagaaatcgtagatggatcagtaccagcaaaattgcagaacaaacgaattatttcattaaatgttgtttcacttgttcaaggtaccggtattcgtggtcaatttgaacaaagaatggaacaattaattaaagaattacaacaaaacgacgatatcattctttttattgatgaaattcacgaaatcgttggtgccggtaatgctgaaggtggcatggatgccggtaacattattaagccagctttggctcgtggcgaattgcaattagttggtgctactaccatcaaagaataccgcgatattgaaaaagactctgctttagctagacgttttcaaccagttgaagttaaagaaccttcaattgacgaaacaattcgcatcttaaaaggtattcaaaaacgctacgaagactatcaccatgttcactacactgatgaagccattgaagctgccgcaaaactttcagcacgttatattcaagatagatttttaccagacaaggctattgaccttcttgatgaagcaggttctagaatgaacttaaccattccttatattgataaggataaaatgcaagaaagaattaatgccgcagagcaattgaaggaagaagccttaaaaaacgaagattacgaaaaagcagcctactaccgtgatcaaattgaaaaatatgaaaaggttaaagatcaaaaggtagatcctgacaagtcccctgttattactgataagatcatggacaagatcgtagaagaaaaaacaggcattcctgttggtgatattcaaaagcaagaagaaaaccaactgcaaaatctagctgctgatttaaaggctcacgttatcggccaagacaaggctgttgaaaaagtagctcgtgccattcgtcgtaaccgaatcggtttcaacaagtcaggccgtccaattggttcattcctcttcgttggtccaactggtgtcggtaaaactgagttagctaagcaactggctaagcaaatgtttggctcagaagatgcaatgattcgtttcgatatgtctgaatacatggaacaatactcagtttccaaattaattggttctgctccaggttacgtaggctacgaagaagctggtcaattaactgaacaagttagacacaacccatatagtttgatcttgcttgatgaaattgaaaaagctcacccagatgttttgaacctcttcttgcaaattcttgacgatggtcgtttaactgactcacaaggtagaacagtttcattcaaggataccatcattattatgacttctaatgcaggacaaggcattaagaacgctagcgttggctttacagcagaaaacgaagatgaagctaatgaatctgctagaaataatatgagccaattctttaagccagaatttttgaaccgtcttgatgatgtaatcgaatttaatgaattgactaagccagacttgcttaagattgttgacttaatgttgcaaaataccaacaatatggttaaggatcaaggcctacacattgatgtaactgctgctgcaaaagataaattagttgaagatggctttaatcctgccttaggtgctcgtcctcttcgtcgtaccatccaagaagagattgaggataatgtggctgatttcaaacttgatcatgcacaggctaagaatttaaaagccgatgttgttgatggtaaaattgtaatcagtgatgaagcaaataatgaataggatttaataaaagacaaagtccaagttataccaaaagatttcgaagcaatattcgaaatcttttttcttaaaaataaaaatatgctactcaatttgaggtatactaaattagaagaagtaaagctaacagaaacaggtgaattccatgcatttaattgatgtaaccaataattactctgatttggttcacagtcagctcaacactaccgatgcaaactatgttaaagtttattctcttggtaatacttcagttatttatactgaaagtaaggattctatcggtattgcacttgaaaaccatgaccgtcgtgttcgcgaagatgagattgaattcgtaatcaagcgtttaattaaagattatgattcttcatacactttgactgtagacaagagtcgtcatgtaatcgaaattcacgttgacaagtaatccaaatattgttgtatcaaaaaaggaggattgattcattcaattctcctttttctttttgctttaaagtttttctgttaattcaacatctggatatttgtcatggaagaaacgttccgcaaattcattttcaaataagaataatggattaccataacggtccttaactaataagttacgagtattagacatgcgtgggtcaagctgttccggatcaatccagcgcgcaacacgatgaccaatactgttcatttcaacttcagaattatattcattcttcattctgaattggaacacttcaaactgcaattgaccaacagcaccaagaatatactcatccgtttgataattgcggtaaagctgaattgcaccttcttggactagctggttcatccccttatggaatgatttttgcttcatcacgttcttagcagttactcgcataaataattcaggtgtaaattctggtaatggtggataaacaatcttgcgcttaccagcataaatactgtcaccaatttgaaaattaccagtatcgtataagccaactatatcgccagctaccgcatcagaaacttgtactcgctcgcttgacatgaattcagtcgcattatttaaacgaattggcttatcagttctagctaaagttacgtccaagcctttcttgaattcaccagaaccgactctaacaaaggcgattcggtcacggtgatgaggattcatattagcctgaatcttgaagacaaagcctgaaaattctggatcttctggacttagctcctcatccccattaactgtgtgactctctggtgctggagccaaatcaacaaagctgttcaagaatgtctcaaccccaaaattggtcaaagctgagccaaagaagacaggagtttgatcacccatagcaatcttctcgcggtcaaacttgttcccagcttctttaatcaaatcaatttcatccagagtatcctggaattgaggatcttgactaagtggctcactatcaggcaacttaccatcttgatctaatggtaaaaagcgatcttgatcatttttgcggtaaagctcaacacgattattagcgatgtcatatagaccctttaaagtttgacctgaaccaattggccagtccattgctacaccctcgataccaagcaaatcttccaattccgcaattaaatctaatggtggacgtccatcacgatcaagcttgttcataaacgtgaaaattggaataccacgttgcttaacaaccttaaacaacttctttgtctgtggctcgatacctttagcagagtcaattaccatgacagctgagtcaacggccattaatgtacggtaagtatcttctgagaagtcctggtgtcctggcgtatccaaaatattgatacgtttgccttgatattcaaactgcataaccgaactagtaacagaaatcccacgcttcttttcgatttccatccagtcactagtagcaaaattgccagttttacgtgccttaaccgtacctgctttacgaattaccccaccaaacaaaagcatttgttcagtaatcgttgtcttacctgcatcggggtgagaaataattgcaaatgttcttctcttttttactttatctgctaactctttgtccattagtcctcgctatcttcttccttttttgattcatcaatcgttaataataccgtcaacaagcgtgaccccttcatccttctagtggtcaaagtcatcccatcaccaatatcaactgttaacttttctcccttagctggaatcacttttaaagtattgatcacatagcctgctatcgtatcaacatcttccatttgaagattagtaccaaattgctcattaaaatcatctaatggcatcttaccgtaaataatgtacttatttgtagctatttgattaaaaagaatctcagtgtgatcaacctcatcatcaatatcgcccacaatctcttcaaccaaatcttcaattgtagctaatccagttacaccgccatattcatctgtcaaaattgctaattgtcgttgcgtttgctgcatttccatcaacaaatcgcccagctcggcagtttctggtgcaaacagcggctcagtcatgacatctttatagtcaagattatcaaaacccttttgtttagcctttcgtaaaaccgttctgatatgaataatccctacaatcttatccttatcacgttgataaacgggaattctagaatatggctcacgaaggatttcatctagattgtcttgaaaactgacttctcgatcaaccatgaaagcatccgttctaggtaccattacttcacgggctgtcttaccctgaaagtccaaaataccttctagcattgaaaattctgtatcatcaattttatgactttcatgtaaagtaacaatttctttttctaaatgatctttagtccccacttttttatcgccggataatctattttttaagcgaccaaacagagttcccgctccaggatcactattcattttcgtactctctttcttaaaaaagttatctaaatatagctattatagcatagagccaataacaattatgttaaaatagcacataagactaggaggttcgtcatgaaaaaaagtcatgtcttactcgtttttacatttcttttgctaattccctatatctgtagcttagctattattggaatcggctataatgcattagttttacattcagctgaactttatcgcacattaatcggctcattagttggcgcaatcattatgtttgctgtcaaggctactattcaacggcctgttgatttattagctgttcaaaccaacgatggcttactgaagcagcttttacgtttcttcagtatcagacggcgctactggcttttagcagctaatattatcttagactttgttctttgctttgctgctacctacataatacgtgctcttttaacacttgatcaaatcgtaggcggctccatcggctttgttttgttaatcatgtttgtttcaacttgtcttggcgcttatgttgaatacgataacctgtcaatcgaccctgagcagcattaattacttgctggccttcaagtacattacttgggccagtttttttgtatccatgtcaagatcccaagtaatatatggcgtgtcactgtcacccaaattttcatgtacttcaattccgctagcaactacttttttggcaaaatttggcacggtactagtcaacggtaagttgaaaaagactaaagtttgattctcttctacttcctccgctacctctgcagctggtaattcaaacttcattaaacccgttggcacttcatcttttgctacatctgctaaaacgccataccaatacataaagctgtcctcacctgataccactaggacagaacgcttattttctaaattatgatcagctaaaaatttttgaaaagtttcatcattttccatttgctgattagcttccataaagctcttttgagcattcatcaaaccagctggaaatggacgaccaataaataatcttgattcaatatttttcttcattttttctcctaatattctactaattcgtctaaatcaattatttcaccgtttaaaaaggcatcaatctcacctgatgaaaaaccgtgactaaacaaatatttttttattttaaaattgcgttcaatttctggaagatttctaaaacgcttgtaagccttaattccttgtttcttcaaagcttctgtttgtgcattctcatcttctttaagatccattgcatcaataataacgttactaatcccgctatcaaagccatgcgttaataatttagtacgcatcttacgctctaattcacgttgtgaaatcttgccaacttgatggctcatcgacttaatcacgcgttggcccacttcgagccaatcttcttcatcaatttcatctaacttatcctgactaatttcaggatcaacgcctttttgcgtcaactttcgtaataaaattttagggccatcagagccaacacgcaaatcatttttgataaacagcttggcatattgacgatcatcaagatagcctaattcattcaattgactaacagcactattggctgcttcatcagagatttcgtgtttttttaaatattgcagcacctcaaagatggtccgaggctcgtaactcaaaaaatgagccgctaaatcactagccttagcatcagcatcaaattgcctaatcttttcaacctgctcatcatttaattctttacctttaagcagcacaaattctgccaacgttttctctccggcagaaaaagcatattttccatcaataaaaacattatagcgacctggccgtttttgtgcacttactttggttatgatcaacttgtttcacctcgcatatttttctacatccatgctagcaaattttgctaaagcttgctaagaactttttccaggtagtacaattaattgaacacaatttagtttttagtagaaagaattaacgatgaacagaaaatttacccataataaaccaaaacatgaaaaagacgtcatcatcactattaaacgtttaggaattaatggtgaaggaattggttactacaagaaaaagattatcttcattcctggtgccttgccagacgaagtagtagttgccaagattgttaaatcatatccacactacatccaaggcgaactggttagaattaaagaaaaaagtccagatcgcgtagacttccctgaaggtgttgatcccgagattggtggcttagaattagtgcacttgtcttacgacaaacaacttgaattcaagaagaacaatatgcttgaatcattacgcaagtaccatcctcgtaattacaataagtataaagttaaaaatactatcgctgctcctgacccatggcattatcgcaacaaggctcaatatcaaattgaaaaagatcatggtcaacttaagcttggactttttgctccaaattcccaccgcttgattgacttaccaaagatgccaactcaaagtgaagatacacaaaaaacggaacgtaaaatcaaggttttaattgaaaaattgcatgttcctgttgccaactatcgtcgtcatttacctggcattaagaccgtagttgtccgtcaatcagaagcaactaaggaaatccaggtaaccttgatttcgatcggccacaagattaagaacttaatccctcttgctaaagaaattatgaaacttggtcatgtagtttctgtctatcagaatgaaaccgaatggcagaatccacaagtttggggaaataaaaccgaaaagcttttgggcaagaatcaaatcaccgaagaaatcttaggtaaaaaattcgccttatcaccacgtgccttcttccaattgaacccagttcaaaccatcaatctttactcagaagcattgaaatacttagacctaacccccgatcaaaccttgattgatgcctatagtggtgttggtaccttaggtattttggcagctgaccgcgttaagcaagttgttggaatcgaaaccattccagaggcagtcaaagacgcacaacataatgtcgagcttaaccacatcaaaaacgctgattatattcaaggcagtgttgaaaaggttttgccagaattacaaaatagtggtgttgcaatcaatgctttaatcgtagacccaccaagaatgggcttagctaaaagcttgatcaaaaccctcttgcgggttaaacctgaaacttttgtctacatctcatgtaatccctcaaccttagctcaagacttagttttacttagcgaggcatatgatgttcgggtcatccaaaatgtagacatgttaccacaaaccccacgctgtgaggcaattgctaagttagtgctcagaaaagatagataaatccaacaacctagtcttgggctaggttgtttttgtatataaaaaagcggctactggacaatcctgtcccttagtagccgcaatttcaagtggatgaggtagctcatcaattgatagtcacgatttttagttgtttggtatgtatttaaacaatggcattatcgcaaccaatattaacattcacttgttcgggtctttacataaaatgtaacttttaataaattggagtttttgcgaacagccaatgataattaatcaaataatttttaattaagctatttatggctgacacctctacgtatagagaatctttcaagtttccaataataatacaattctggagataaaaacttacttatatttttttatagttgttaacttttatttctacctcttccacactattcattatatctagttgtgaaaccgtttacaagaactaacccatatatttttgcaaaaatctttctacttgttgtcgatattgctttggatacattggataagacaaagcatgccctgcaagtggcgcaagccaaatttgcttttgagcagctgttgccgcataattttgccagaccatcttagttggcacaaagtgatccttgccgccatgaataaataaaaatggtcgcgtatttttatttaactgagcaaccgcagaagcatcttttaaataaaagccatttttcactctattaattccactaaccaaatcaactattggaaaccgtggaaaagccttcatatgaaataaattttgagcttgatagttaatttcacctttcacggttgaataaccacaatcttcaataaaagctttcacttgtggtggcaaaagcataccgcttaccatcattgccgttgcaccacccatgctttgacccataattacaattttggcatttgtaccagtttgatcaattacttgatagatccaacgcaaaatatcatctttttcagcccagccatagccgatatacttaccttcgctgcgcccttgggcacgtgcgtctggaacgagaacattataaccaaaatcataaaacattttggcaaaaccagccatactatctccatcactcataaagccatgtaataaaattgcggttttttggcatgtttatcaaggtactgggcgaacaaagttatgccgctatcagtttttaaagtccatgttttcttagaaaaatctctaaaccaaaccttatcacgataaagtggatccttgcctgataattctttggagtcagcttttttattaaacggtgtcatcgccatcttgaaaaagtactcgcttgccgcaaacaagccagctccagcaattaatgcggaagacaataatagtttctttttcatcttttaacacttccaaattcaattatttcacttttcattttataattaaattgctgaaaatttacaatccttatgacttaattatactgaaaaatgcgcttaacagacttgcttcaattaatcgatgacctgaacctgaatactaaattttatctaaagcatgatgacaaactacttaagtggggaaaactcactattgccgaaggaaaatgtctgctgctacccgggcaaacagcaatgaccaaacaaaaattgattaaattagttggccgcatgcgtggtcgcggcatccccttgttaatggtcattgaccaaaaagaatattccattttcggcctacagattcgcgaagatactggacaagcaattttaatgtaaaaagtgtctgggaaaaaactaagtctcagatcatgaaaaaagaacgttgaatttttgtttcaacgctctttttgtatacttttagctccagccttgatattattaaatcatcacaaaataaaaaaggtggaaactaacatgtacaagaattatatcacaggtcaaactgctttaacacttaatctagattttgccattccggccaatcatttggctaatgtcatcagctggtttgtagattcaattccagaagatgttttagtaggcaagactgctaaaacgggccgcccagcctatcatccagccatgatgctcaaaatactgctttttgcttactccagaagagttttttctggcagaaagattgagttgatgctggaagaaaatctgccaatgatgatcttggctgaccagcaaaagatttcatatcatactatcaataattttagatcaagcagccatgccaatgaactgattaaaaagagctttatctacttcactaacctgttagaagatgaaggcttaatcaatgaaggtgctgcttttatcgatggtactaagattgaagctgatgctaaccgctatacatttgtctggcgcaaagcggttgaaaagtatcatgaaaagctgaaaggccaggcagttgaactttatgatgaattgattactaaagaagtagtcaaagaaatggaaaaagaaaaagttcaaactagtcaggggctaaaggaattagctcaagaaactgaagcagaaattaacaagctgactaaagagattgagcaggaaaacaaagccattcctggcggttcacctcgaaaagccaagcgacgtggactaaaaaagattctgcaccggctaagaaaagattatgtgccaagaatgcaaaaatatgaagaagccgaagagatctttgccggacgcaacagttattccaaaacagatcatgacgccacctttatgcatatgaaggaagaccacatgaaaaatggtcaattaaagcctggctacaatattcaagcagtcacgaccgatcaatatgtagttgattatgccatctttcctaatccgacagatttcaaaactttggagccggttttggatcaaatgaccgtgttggacaagtttgacaaaatcgtcgccgatgctggctatggcagtgaatacaattattcgatgctggaggaaaaatatccagacaagaagtactttattccctacactatgtatgaaaaagaacagaccaaaaagtataagaatgatccaactaagctaatcaactggtactacaatgaaaaagatgattattacattgatcatcatggcgtcagattcaatttcaaatattacagccagcgtaaggatcgttctactggtcaggtccgtgattttaaggtttatgaggcagacgagttccagctaacgccagaattggaacaattggctaaaacagctagcggccgccagcgccaagttcgctataatcctaactggcaatatttaaaagaaaaagcaaaagaagttctccaaagcgaagaaggcagacacatctatggcatgagaaaatatgatgtagagccagttttcggacatttgaagaacgtatttggcatgcgcagaacgcacctgcgaggtaaagagaaggtcgaaaccgatatcggaattgcctttatgatgatgaatttgaacaaatattgtcaaagaaggtggctgaagggccgatttttattgttaaaaattttaaagagaacaaaaaaacgatcaagattcttaaaaaaggaaatcttgatcgtttttattcatctggaagctagttttttcccagacactttcttattcttttacgcggtattgacgaatatgatccttagtaccagcaaaataccaagtacctacttcatcgtcgctagttaattctaagccatcctcaggatctaacaaagccgtattgaagacgtcttcatattgcttaactgtcagcttcttccgccgatcaagcattgcttgatcagctgtaggatcaacttgtttttcatatccttcaaccaacttgccactataaaactcagccattgcacctgaaccatatgaaaacaggccaattaatgagccagcaggtaattcaccattctctagcaaactaagtaaactcatataaagtgaagcggtgtagatattacctactcggcttgataattgtttagcagccgcaaaactacgctccaacttgatcattgttgcttgatcttgcccctcaatcgcaatattattagcttttaagcccatcttagtaaaaggtaaatgataagtaattgcatcaaaatcactagtctttaatcctttttgcttcttataatcagtaaaggtcttcttgaagaaatccaagtaaacttgagtcgaatacttgccgtcaactaaagcggtgcgagaataatttggtctccagaagtcgttaatatcttcgctgtaagctgaatgaccattatttagggctaaaatgcttgggtcagctttgatgagcattgccacgctaccggctccttgtgttacctcaccagcagtattaacaccatagcgagcaatatcactaccgatgacaattgcggtttgttcaggatgtacccgaacaaaatcacgtgccatcattaaggatgccgttaaaccaaagcaagcttcctttacttcaaaagttcttacttctggcttcaactttaaggctgtttttacaaataaagaagctgactttgattgatcaatactactttcagtcccaaaaattaatagaccaactttgttcttatcaatcttgtcaataaactttaaagtcgcattaattcccattgaaactgcatcttgcgtaatatccgcaacactcatctctctttgaccaatgccaactaaaaacttattttgatcttgctttcttgcgttcgccaaatcgaccatatcaacgtacttgtctggcgtaaaaagtccaatttgatcaatacctacttgcattatttttgctaaaagctccttagcatgactttcagaataatttttttcactaatcatcgcagctagtagctgcttgcgctcatgttcattatcggttaactcagcaaccacatttctcgcctgcagtttcatatgtcctgcttgaatgccaacagtagaaattgccagcaaagctgctaggttgttggctaaagccacgctaacaataatctcagctagagttttactcgtgattttttgtcctaaaatagcaaaactttgttggacgtcatgacgggccttaattgagccaccaactactccgatcgccattggcaacgttaattcgccaactaaataactaccctgcatcgtccactttgataaactgcgatattggccatcatgattggctaaaactgcagtggctgcttcaattgcccgataatcattgcctgtggcgattaagacggcgtcggctccattcatgattcccttattgttagttaccgcacgataaggatcgtcaattccaatttttcctaatagagcaacacgttgtgcaacttgcatcccaccaatcgtttgtggatcaatcttcactttagccgtggccaattggctaggataatttgataaaatcgcaaataatttttcatcaacaccagcataattttctaatttagccgctaaaaattccaaaatcgagttggttttattcgcgcccatcgcctcagctggatcaaccaatacttttaagtaaagcaaatcctctttctgcacagcagttatttttctagtaccaccaccatgacggactaagctggaaaacttttgattagctaattcgactaagtgcggaaattctttttctaattcaattaatgaaaaagaattgttgaccttcaaaacgatttgaccataaatcccttgtcggtcgctgctagctgtcacaccaccatttctagcaaagatactagctccatgattggcggcagcaactactgagggttcttcaacagccattggcacccaatatttttgtccattgactattaagttttgtactacgcctaaaggcaaacgcaactgccctacaacattttcactcaattcatctagacgtctcagaaccgcatcatcgatttgctctaatgcaataccttcatcctgcaataatttacgtctagcttcaggctctaattgataaaatttcattctgcattctcgatttcataagcaatcgcctgaccgccaccaatacacaaagtaaccagggcacgtctgccttttctcttctttaatccactaattgcactagcaactaagcgtgtacccgttgcacctaaaggatgacctaacgcgattgcgccacccataatattcaatttatcagttggaatttgtaagtcgcgagctaccgctacactttgggctgcaaaggcttcatttaattcgataatatcatagtcatcaaaattacgccccgtcttcttaagcagttttttaactgcataatatggagtataacccatcagtgcaggatcaaagccagcttccgcaaattcacctaacttggcaatttgcgttaagcctaactctttcattttctccttagttgccagaactaacatacttgcaccatcagtcaaaggagacgagtttccggcagtcacttcaccatccgccttaaaaacaggctttaagttactcaatgcctcaagcgttgtatccggacgaattggttcatcatgatctaaactttgaccatcaatctccacatccaggatctcattatcaaaaaatccggatttaactgctacagctgcctttttatgcgactgcaatgcaaattcatccatatcctgacgactaacatgatatttttctgctacgttttcggcagtaattcccatatgcttgccagaaaaagcatccatcaaaccatcgttaagcatagtacttactaggtgatctgctggatcatttttgttttcttttttaacaaaataaggcgcattagtcatgctctcactaccgccgacagctactagatccaaatcgcctagttccatctgtccttgagctagacgtaaagctttcagacttgagccgcagacttcattaattgtaacggctgcagaagcttcactcatccctgaatgtaaggcaacttggcgagccatattctcacctaagccggtatccaaaacattccccataaacagtgcttgaacatcagctggcttaatattgcccgccttcattgttcctttcaaggccattacacccaaatcaattgcagaagcatccttaaaaaatcctcggtacttgccaaaaggtgttcttttagctgcaacaatataaatgtccttcatatattttctctccattctccataatgtgtattttttaacaaatatgataatagcaaaaaaatattaagaaaaacataaaaagactacgccgcagcgtagtctccctaataattaagcttattttttattttgcttaccttcagcttcaaacttcttgctcaattgcatgatatatgcccgcaattgttccttaatttctgggtgcttcaaaccatattcaattgaagtttcaaggtagccttctttgttaccaacatcatgacgttcgcctttaaaggcatgagcaaagacacgttgagtcttgttcattgtatcaatcgcatcagtcaattgaatttcaccgccacgacctggtttttggttagccaaaatatcaaaaatttcaggtgttaataagtaacgaccaataatggcataatcactaggtgctttatcaatatcaggcttttcaacgaatgacttaacattgatcagtcctggcatgatctcattttccggttcgatgacaccatacttagaaacttcttcatgtggcacaggcataactgcaattgtagaagcatgcgtcttgttatagcgatcgatcaattgcttggtcaatggcaccttatcttccattaagtcgtcgcccaacataactacaaatggttcatccccaacaaaactgcgagcacggaagatggcgtctcctaaacctgctggatgcggttgacgagtgtaatacaagttaacgcctaaatcagtaattccttcggttaggcgaagcaattcttttttacccttttcttccaaatcttgttctagttctggattagaatcaaagtgatcttcaattgggcgtttgttcttgccaattacaattaaaatatcttcgattcctgactttttagcctcttcaacgataaactgaattgttggtttatcaacgataggtaacatttccttaggtaaagccttagttgcaggtaaaaatctagtacccaaaccagctgatgggataacggcttttcttactttcataaaagcacactttctatttcaattttataagttcatcataacaaaatatgcatttttcagctacttagtttttcgtcttttcttttgaatataactggcaatacgaccagcagaatattcaacttgtccaacacggtttcgcacaatagcagcgttaacaccaacgccaaataaaaataatactgctgcaatattcaaccagagcataaagatgataaacgtaccaacaatgccataattctcccaagtaatcgggaaatggtgtaaatagaaactaaaaagaaatgatagggctaaccagcctacaacagttacaaaaactcctggccaaattactctctttttgagttttatattaggcaaaacatagttcaaataccataatgctagcatcataaccaatattaatactggatagcgataactaaagattttgctaatttcattaagtggtagctgaaaaatcggtcctaaaaagttgagtacttgttgcccaaaaaccaaggccaatgtagcaattgtaaatactagaatcatcaatcctgtaaaaacaaaagtaatagttctagtccaaagaaaattaagcattgataattttaattcaacttgatgaaccccataaagtctattttctccaagacgaattgcattaaccatatttgataatgaccaaactgcaaacacaataccaaaagaaatatagcctgttgatgtcgttttcaataaagaatttataattggcataatgaattttgacacttggtctggaaaaaccaagttcaaatattcagcaataggcgcagtatcaatgtgaaacaacggtaacacgttaccaatgataataataatcggaaaaatagaaaacaaaatgtagtaggcaataataattgaactagcaaatatctctccttgagataaggtggttcgtaatgtagaaataaattgcccaatttttaaaccaaaatggtttttaccatttttcatccattatcctaatcatccatctcatcaaagtgagggatgtacttttctaagccatcgtaaggatgctgcagggtcaagatcttaggaccatcttttgtaattgcaaaggtgtgttcaaattgagcagcattagaaccatctggagttgcgtagtaaacccaatcatcgttaggatcatcaacagtacgttggtcgatgtgccagtcgccaccagcttctaccataggttcacaagtaatagtcatgccttcacgcaagcgaagaccatgacctgccttgccccagtgaggaacttctggatcttcatgaattgatggttgaataccgtggccaattaattcacgtacatcaccgtaatgattttcatcttcaacataatgttggatagcagcaccgatatcaccaattctgttacctaaaacagcttggtcaattccgagatacattgcttttttggttacttcaattaatttcttatcagcttcggaaatttcgccaactggataagtagtacatgaatctgattcataaccgttcaagttgcaagttacatcaaccttaacgatatcgccttcctttaagatgcgatcttttcttggagtttggtgggcaatttcatcgttaaccgaaatacaagtaccatacttataaccctcaaaaccttgttctgaaaggcggccgccacgacttgatacgaagtcttgacaaaactcttcaattttccaggtagaaatgcctggcttaatcacatcacgtaagccttcaaacatagttgcaagaagatgtcctgaagcttgcatgcctttaagttcacgaattgatttaattgtaatcaaaataatttctcctttataaatttttatttagtttcagatatttctattataccgttttccaaaatacttttaaaaggtcgggtttttgtagaatcaaaacaaaactctagaaatacctgaaatatttttaaagtttgctaaaactaaacgtttttgcaatagtttcatgtataataaggtgtcgtataatgcagtgaaaggtatgaaaaatcatgaaagcaagaattgtttatgccagcatgactggtaacgatgaagacatggctgatattttagaagaagatcttcaagattatggctttgacgttgaaacaagtgatgtcggcttcactgatgccaatgactacttagatagtgatctttgcatttttatcacctacacctatggtgaaggcgtaatgactgatgaattggcagacttttatggggagttaaaagacttagatctaacaggcaaacattttgctgtgatgggttctggcgataagacctacggtgaacacttttgtgaaaatgtttttgactatgaaaaagcattcaaggattgcggcgcaactgaaattactaaacccgtaacaattgaaaatgcgccagatgatgatgcagtcgctgcaatcgatcaagctgcaaaggaaatggccgataagttaaatggctaataacaaaaaagacgtcacagctgttgatcaggcacaaatacgccgtctaggtcaaaaattaatcaagcgacaccgtaatctttgggtttacatggttttcggctttgtcgctgcattaatcaataccttagtcttcatggtcttacactcatggtggcataatgtgatggtaatttctaacaccatcgccttcatcgtctccaacctggcatctttctggtttaaccaaaaggctgtttttatcaataatgtcgatcatgaacacagcacgtggcataaactaatcgtctttttcacttatcgcgtcatcagtttaatccctgatacattaattatgttagtcggcttatcctggctgcatttaaacgcattactagtcaaaattatcgaccaaattttagtcggtgtattcaattacttaactactagatcagtctttcaaaagcaagaacatactatgattgaacgtgcaaaaatgcgcattcaagaaccaaaaaataaaagagacagcaaaaattaaacaatgtcattaagttaagacattgacaaattatcgacttggacttttaagatcattcatttgcgatttatcgcatttgaatgctcttttttcatgccaaataaacccaaatcttgtttagaaattaggctacacgatataaataatatacagctgatttgggtttgagatttcttttgtcttttcgtcctggtctgatcggaattgtgtaatgactaatttgaataagaatctttttaaagatttcagttgaagaagaaattatatacatagcctggatgacaaaacatgactgtttgaaattgatcgcatattgatacttgcattttttttgtggtacatatgcttgagcatcaatttgactgactgcgttaaacataatcatgtgggcatagatctccatttcaataaatctatcctgcttggaatgaaactgtacgctacctaaagcatatttcaactttttgaatgaagtttcaatgccccagcgcaaatggtagatttctttgatcctttttaagggataatcggctctatttagattagttagaacaacttcccattcttctttgcctgatttaggatcattaattctaaatttacaggcacgaaattttattgtacataactctccaaagtcccagctgccatctttggtatttttagaccgatattttatatattgacggtaatgatggttaaccaaatgaacgttttctgtagccttatgggtttcataataataattagaggtagtcacccagcaagctatatccttatcacactcttgattaggcaactcagctacttccttaaatgcgccatatcccgttttagtacgtatgacataataacagttaggcaggcgattacaattttcaatcatgttaaagccggtataacctcgatccatagtaactatatatggtccgcaatttagctttttaagcatttgaacggcggctttacgttcatccatctttgacttaggctgaaagatgcagtcttgataagtattatttaacaggtcatagagtgcattaacatgaatttggcaatatggctttcctttatgattgagatttccaacgatattctctgatttaggattccagatttgattaaaatcagacccatcaatggcaaatatacgatatttatgatcaaataactggatattaaataaattctgattaaatacagttagaatatgcttaaaacatgcgggtgaaagctgacctttgcgttggacataagcggaagtactgactactttatcgttatttttaatagctttttggccaaaagctctaaacaactcactggtcaaatcttttccttgcatattaatagtagttttaatgactgtagctgcatctaaaaaccgcttcctagtgaaggcatgaggatcatcgataaaatcatgaatatgctttccagtatcattgataatttgatcaagacgatctaaaatatttctgtgaagggctttcataattaacaccagctttctggcaataattttgaaggtttaataatttaatcagagggcgaaaaggtaggttcttttcgcctttattttatgcaaaaaaagaaccaaatcataatgattcggttctacagagattagattcaatttgtcaatgtcttaacttaatgacattgaaaaattaaaactgtctctttatttttttactcaaaatcttttggtttactttcactatcttgattaaagtaataataaatatcatccataattcgatcagctgcatgtccatctccatatggatttttggcattcgccatccgatcatattcgtttttgttttctaacaaagctagcatttcttcacgcaccttgtcgacttcagttccaactaacttcaaggtaccggcctttacgccttcaggacgttccgtcgtatcacgtaaaaccaaaactggtttacctaaactaggagcttcttcttgtacgccacctgaatcagtcatgataaagtatgaacgtttagctaagttatggaaatctaccacatcaagcggctcaatcaaatgaatccttggatcaccaccaagcacttcattagccactttttgtactcgtggagataagtgaaccggataaataatttctacatcaggatgcgaatcaattacttgccgcattactttaaatactcggcgcattggctcaccttgattttctcgacggtgcatagtaaccaaaatcaccttattaccaggagtaattgcgtccattacctcatgatgataatcttgttgtacagtctgtgctaaagcatcgattgccgtatttccagtaacgaaaataaaatcagaatggtgattttccttcagtaaattagccttactcaattcggtcggtgcaaaatataaatcggctaaatcatccgtcatctgccgattcatttcttcaggatatggtgaatacttattccaagttctcagacctgcctccacatgtcccaatgtagtttgctgataaaaagtagctaaagaagccgcaaaactagtcgtcgtatcgccgtgaaccaagacaatatctggtttctcttctttgatcaccttagataaatcaatcatcactttagaagtaatttcttctagagtttgattttggtgcataatattaaagtcataatctggtttaattttaaaaatatctagcacttggtccaacatttcgcggtgttgtgcgctaacgaccgttacttcttcaaaacgatcatctttttttagtttcaaaacaagtggtgccatcttgattgcctctggacgcgttccaaaaacagtcattaccttaattttcctcattaaaaaattcctccgcttaactattttactatacctgattttagactatcttgcacccgctttctgtgttttaatggaagtattaaattgaaagttggtcgatgcatgaattcatcattactattattaattacaactggtttaattattttgattggaactttttgccttgtttttggtatggacaaaaacagacccgctaaaactagaaaatatttactttatactgcactaatctgtgttttcctagtttggggcttaattactgcaattatgcttcaacccttaggataataaagataccttttggataaccaaagcatgtaaaaagcctgcaagaccaatacttgcaggcttatttctatgaccccggtgagattcgaactcacctctacggtttaggagaccattgttctatccagatgaactacggggtcaaacctaagattaactttaccaaaaaaagtggtaatagttaacctttttttagaattgtggattaaaaaatgttttcggatggttggtatcagcaatcttatcagctgctttaacaaaaggcatccaaattagcaaagtaacaatcatatttaaaatgcttaaaacaattgcacgccaatcataattgcaagccagaaatgggccaataactggtggcatgatgctaggtactgccacttgaactggattaaccaatcccataatgctaacccaataagaaaaggcaacattaactagtggcgctaatacaaatggaattagatacactggatttagcactacaggcaggcccaagagaattggttcgccaatgttaaaaattcctggagctagtgagattttggcaattgtgcgataatcactgcgtttagaaaacattaaaatcgccacaattagcattaaggttccaccagcaccgccaaaccaggcaaagacatcaaatgagccacgtacccatacatatggtggaatatttccattactaatcgctgtgatgttatcattttgagcagtcatccaaattgaatccaaaattggtgatagaacccctataccattaattccaaaaaaccaaaataactgcactaataaagtaatgacaattaccgtaccaaagccttgtccccactttactaatggagtttgaattgtggtaagcaaccaatttccaaaatatttaccggtaagaatttggaacaaataattaattccgcctacaccaaatattgcaatcattgcaggtaataaagaatcaaaagcagcttgttcagcatggggcaagttcgatgtcacatgcaacataatccttgctttatagcaagcataataaataaaaaagcctaatgagccaaacaaaatagcagtaaagaggccagtagttgagaactgactaatgtcaaatgcattatgcagtgtaacattatcaccatgaaatttaatcttagctatattggcaatgcttagtgcaaaagaagataatgccacaattgaagcagcaagtctatttccttcaaaagcttttgctagttgatagcctaaagccaatgctaagaaaaaggcaaataatgaaaatgttcctcgccaaactaaattactgattgctaccaatggctgtatcgcaaaagcaaaggcataccagcctaaatgatcatgagctgcttcaattaagctcttaattaaaactgctaatgatcctgccattgtaattggcattaatgagacaaatgcatcccgtaaagcaactagccatcttatctgaccccatctactagctagcggcaaaacatagtcctctagccatctaactaaacgaatcatttctttcctttcaagtaatgtggatgatatcccttgttcttattacgtttcttgcgttttttagttttatttttcttagtcgaagtcttaatgggctgctctttagcctgcttcttttccttcttgagtttaggcttttcagttgttaaatgatagcctgcaaagtagacacgctctatttgtaattgatctgccaataatttcttcaaatcacgaaaatcgtgatcatcgcctaaggtaaccacataaccttcagcgttcattcgacctgttcttcctgcccggtgcatgtaagtattagtctcgctcggaatatcaaaattaatcacataggtaaggcctggaatgtccaacccacgcgcagccaaatccgttgctagcagcaatttcgtcttaccagtagctaggtcatttaaggctttttcacggcgttctttaccaaattcattagctaataattcgaacttagtcttagtatgcccaaaaataccagcaaagcgcatcatcgttttatttgaatcaaagaacaaaattcccttaaagtgatccaacttagtcattcgctgcaaaaattcaatcttgtgttgattgtctacttgcaaaaaataatgtttagtcgctgaagcttgttcatttctgacatctactaacaagaaatgacggttaaaaacttgctccgcatcccgtgtaatctcagaatctgttgctccaaataataagatttgactgtctggacccagattttgccctaatgctgataacaattccattttagtaaattctaaaatatcatcggcttcatcaataatcaaagtcttgatctggtttactttaattcgaccacttgagaagaagtcaaaaaaacggcctggtgtagctacgaccacttcaggatgctttttcttcagattgtcttcttgtctctttctattgccagcaccaaccaagctgacgccttttaatcctaaagcgtggatgtaaggattaattgcatgacgaatttgtacagctaattcagtcgttggcgcaataattaccacgctgttagcattacctggctgtgctttttccaaactaggaagtgcataagccaatgtcttacccgtacctgtcttagccaatccaaccaggctcgcaccattgcgaatggcatcatagctttctttttgaattaaagttggctggtccttgtgttctctaattaaaacttgtttgattttttcttgatacattattactgtgttaattgcccatacttttgcttatattgaccaacggtcccgttatacgcgtacatcgttacctggctttctaagcctgaaacattccttacgcgtccgttagtagtgtagcaccaaaatgaatactttaatttattcggtgccttactatctgatgacataaataacgtttgcggattaaagtaatgttgatatttatgatcaactttcaccatgactcttttgccagctgcttgcaataaagccgcaaactgccccattgaccgcaaatatctcgctgaacgagtagtcactgccggtacaattagaattggcagcgagcccgtattttgtcctacttgcttaaaaaaagtagcggtaatgctgcatcggagtcgattcattgctataggaaatctcactaccaaatgccaagttcgttcctaaaatttggtcacgataagacagatagttttcatcaaaatatgatctgccttgggttgctttcaaatatataaaggaaacgccattagattgcaatttatgtaaatcaacatagtcaatatcttgatttaactcaatcccaatcgcacttgaattagcatctggcggtaaagttgtttgccgcttaaaattgaaaaagccaatcaaaagaaatgcaatcgccagaattaataaagtcaaaatcgctggcaaagtatacttatgctgaaatcttttcatcggctaaattcctcccttaattattttaaccgaaaagcctatcaatacaaaaatttccgagactgtaaaatagtttgtgtaaggatgaatgattccttaaatttatttctttaaacattagaaaaaggagttcctttctcgtatgattggtttgaacaaaaaaaacacatacagaaagaagaactccttcatgaatgattttaccaaagattttgctcaagctctattcaatccagacaaaataaatgatttattgcgcaaagagctacaacaggctgttaataacttgctagaagctgagttgactgcctttctaggctatgatccctatgccagaaatggctggaatactggcaattctagaaatggtgcttatttccgcaaggttgatacccagtttggaccaattgaagtgcaagtgcctcgagaccgcaacggtcagtttcatcagcacacgctgcctgactacaagcagcactctgatgttttggaaagcacgattatcaagctctactccaaaggcgtaactaccagagaaatcgctgacttgattgagaaaatgtatggcagtcattatagtccagctcaagtatcaaatatttccaagcagatgctccccaaggttgaggcttatcacaagcgcaagctaagcgacaagtttttctgtgtctatttggatgcgacataccttcctttgcgccgagaaacgtttgagcgtgaagcagtatatattgccattggcattaaacctaatggacataaggaagtcattgactactgcattgctcctagtgagaacattgaagtctggacagagatgcttcaaaacatgaagtccagaggcttgaagcaagttgaactctttctttctgatggtgttgttggcatgaaaacagccttggccaggacttatcctaaagctcattttcaacgctgcctggttcatgtcatgcgcaatatctgtgctaaagtccgggtggatgaccgcgaaaagatcatgaacgaattcaagcagatacatcaacagacaagcaaaaaagaagctgcagctgtcttgcacaaattctatgccagatggaataaagcttatagccatgtcatcaaaggtttgaaggaaattgagcccgatctgctggtcttctacaattatcccaaacaaatcagagcttcaatttattcaaccaatatgattgaatcctttaacaacgtcatcaagcgtaaagctaagcctaaggcagaatttccaactgaacagtcgcttgatgcatttattggcatccaggcaatgagctacaatgaccgctatttcaaccgaattcataaaggctttggtcaggttcaggataccttagaatcttattttgaataaataattaaaaaatcaatttacgagaaagaactatttacacaaaagatttgacagtttcaaatttccagtcgatgtgctaaaatttaaataatgtaaacgaagggcaacaaataaatatgaaacgacaaatctcatttggccaagcattggctaccgtagtcggttctgtcatcggagctggcgtatttttcaagatcggaacaattactgcacaaactggcagcacttcaatgaccctgtttgtatggattttagctgggatcatttcaattgcatcaggtttgaccatttcagaaattgccgccagcttaaaaattaatggtgccattaagtatcttgattacacttacggccgcgtgtggggttttctttttggctgggcacaaatgattgtttattttccagctcaaattggtgccctaagctcaatttttggcgttcagtttgtctccttatttggaattaaggcgaggtattctaacctaatagctatcttgctagtgctttttctcttaggaattaatctaatcggaactaaattttctagcaaaatgcagtcggtcatcactatcctaaaaatcattccaattgctttaattattatttggggattatttaatcctgccaaaatacctgcaccaattattccgttaacagtcggcactggacattcatttccaaccgccattagtcaagggttactttctgcgttattcgccttcgaaggctggattgtagtgactaatttggctaacgaagtcaaaaatccagaaaaagacctttcacgggcaattattttaggtctttcagcaattacattgatttatgttttaatcaattatactttcatgaccgttttacctattgatcaattaactaataacaataatgccgcgtttcaagcttcaatgaaattgtttggtcaatttggtggaaaactagtcactgtgggaattttaatttctgtttacggtgcggttaacgcattcatgctgacagggatgcgcacgccttatatcttggctcaagacaatttattgccattctccaataaaattggcaaggctaatatccataccggtgttccagtagttggcgcgtttattgttgatgctattgcaattgtcatgattctactaggtaattttactgttttaactgacatgctagtcttcgttatgtggactttcaacacaatgttgtcagttgccgtaataattttgagaaagcttgagccagaattaaaacgtccatttaaggttccatggtatccgatcattccaattatttccgtgatcggtggtatcttcatcgttgtctcaacaattatcaatcaatttgttctttcaattattggtattggtttaacattgttaggactgccaatttactattacatgcaaaagaaaaataattaacgaaaaaagccgccgattttgggtgactttttatttgagtaaatatatttcctgaattgtcaaattaagtgcaacagttaggttatgaagagatatattgcttgaagagtttctctgctgtgtgatattggaggattcggcgatatttgtggttaatggcatcagttgcctgttgaacataagcttttgacttgtctttcatgctcttgctcttagggaagaattgacgcaaaagaccattgcagttctcattggtgcccctttcccatggagaatatgggtgagcaaagtaaatctggcagcccttgatcttggtcatatccgcaaactcagagccattgtcaaacgtgattgatttaaaccaggcaggatgtctgtcaatctccttttgaagcagcctttggcatgtgcttgcccgatagtcaggaatcttgataactacttcaaagcgtgtggttctttcagtcaaagtcattaaagcaggctgattcttgcgtctgacgcctttaaccagatctccttcccagtgcagcggagcttttctgtcttcaatctctttaggacgctgttcaatggaattgccaagatgcttcttgtgcaaagcgtgaccgccatggctgtgatgacgcttgttcctgcgtcttttgagcttcataggcagatcaatattgcttatgtccagcaagccctgatcaatatagcgatagacagttggtgtgctgggacaagggtagcctggcatagtccttttgaattcaccaacgaactcatcgatgctggtggcatcaaatttagctttaaagcgtctggagagcattctcaaaaagacagcataatgcttcaatggattgcgctgatagcagtttttgcgacgcttctcataataaatctgtgcagtatcagcgtaatagtgctcatacaataaatagctgctgtctctttgcaggacacttccgcgtttgatttcgcgactgattgtcgacttatggcagccgacttcttgagcgataacagtacgggaagttatgccggaatccagcattgcttgaatttgtccacgttgtacgctggttaattgatgatagtgcttagaaatgctagaatttgaattggtcataaagatcttcctttcttgatttttcgtcacttcaagtttaggtcttcatggcctttttgtttaacacttagtgttgcacttcaattttaaatccggggagtaaatatatttattaatgttgtgaagcaccgctagttgcatcattttcttgatgatcttcataggcagtattggcagcaattcgaccaaaagtgaaaatatctgccaaggagttaccacccaaacgattaccagcatgaatgccaccagcattttcaccagcagaatatagaccatcaataatttgaccatctttattcaaaacatgtgccttagtatcaattactaagccgcccatagtgtggtgaatagcaggctttctcggagtagcatagaatggtgcaacttcacatttgaggcctaatacattcttatggaagtctggatcctcgccacgatcaacgtaagaattataatcctggatagttttaaccaaaactgctggattcattccaatttgttttgccaaatcttcaagcgtatcagctctaaacaaggttccagccttaacttgcgcatcaagtgactcttgggttgtattgtaagcagtgtccttaatcttatcgtccgcaatttgataaatcaaaccaccattttcgataactgccttagccaaaacatcccgttccgcaaattcattaacaaacctcttaccctttttgttaaccataatatagttagcaggcggagttacaacaccagtgaaaagctcaccggtctttggatcagctactggcattaattggataaagcccataccgaataagtctgcaccagcttcaagacctaagttaatcccatcgccagtaattgcaggtgaattagttgttgtactatcgtactatcgtctgcaatgtttggccaataggtattgtatttttgaaccatcttagtattggcaccaaagccacctgccgttaaaattactgccttagcatgcacagtcaaagtactaccgtcagcgcgtgtcgcaattacaccgcgtactttgccatcttcaataattagtttttcaacacgagtttcaagatatggatcgacaccatgctctcttatccaatcacccaaaacgtgaataaaggcataacctaatggctctactggcttatgacctctgcgccacaaaccaccaactggttctgtaacttgagaattatcaaacttaacacccaaatcttggagccatttaacagaatttaaagcattagttaccaattcatgtaccaaagcatatttaccatgaatttcgttaccttttaaatcagtccttttaccacctaaataagtttgaatttcatggagtaaagtcgaatcaaataaataatctgtaccagaatcaatatattctttgatttgtctttgtaatctttcaaaatcaaagcggtattctaaatcaatttgttcaattggcgtattagccaagtcttctaaagtctgtttttcaccaggaagagccttaaatttactttgccattctggttcagccgcattcattggaccaccagcacggctagtattaccaccgatctgtggatacttttcgagaacagccaccctttcaccatgttgaattgagcgaactgcagctgctagaccagcgccacctgcaccaactacagctacatcaacagtaatttcttcatcttctacctttgtagcagcgggcttttcacggtttttccattcggttgaatcgccgcctgcttcatcaattgcttcggctacgccatcaatcacaccatgactggaaatagtcgcgccactgaccgcatcaacgtttaaagtttgattttccacaattgttttaggcaaacgtctaaatacttcatcggctactcccttagtttcacctgatgaatctactttgattgaagtaactttatcgccatcaatgtcaacttccattggcattgattcggaaccatgacctttagcttttacttgatattttcctgacttcattgcttacacctctaataagtttaattttatccacaagttaatattagtgcgtcatctgttgatgtatcaaatatcaatttcactatactttcataataaaattgttatgagataactatgtttcgttctccaaataaaaaaagcttaatgcaaatagttatccacattaaactttttaattgcatgatttaattaataaactgaaacttgaaagctaagattaacgctccttccccgcgcctcttggctttttcttatcaaaaataaaaacgcaggatctctctgcgttatactttaagtgtcaacctgaaaagtaaaggagatcctacgcaatgaacagtatagaacaaatcgacacagaaaacgataccaaatccttaatttcttcatttattaatctaattggtctagctaagttgactaaacaagtcaactttaagcgtaaatctaccgtttcattaaccatgattatctcttggctgatgtctgtacattttgctcggctttccttattcagagctaagagtgacaagcgtttttccgttagaactgctcgcaatgtacttaacgatggaagaatcaactggcaaaaactattatgcttgattgcagctcggctcattggctgcttcaaacatccgtaaaaagaaacattatctttattcaagcatagttgaggctcaatatcatggacatatctttttattaaagctcgtttttgtctccaaccgtggaaacaagaacaagtatttagttttagctactactcagacaaagcttagacctaaagaaatcatccaactttatggtcgtagatggcaaattgaaacatattttaagacgtataagcaatatcttgctttagataaatctcaagttcaaagctatgatggacaatgtggctatatcgcagttacagcaataacttatgatctattggcctggcaggaaagacaaaatacagatgataagacaatcggagatttattctatctaatgaacgaatccttacctgatattagattcgtagatgcattggtctacttaatttcagaattaaaagagcttaaacagaatagttttgaaaagatagatgaagtaatcaatgactttattaaccaactgccacgattcatacaaattgcactgaaacagatcatataaaaactaattacgtctagaaaagctcaatagtgacaggacttgagcttgattttggtgctttcaagtttcagtatttaaattaagcttcagaggcgcctgatacagcatctgcttcttgttcatttgaaacagtaaaataattataattggtattatccgcagcagtcgtacctgcaacaaaaccagaagcatagctccaagaattcatcatacttggcattgaatcatgaccattagcaccaccaacaatttctcctgcagcatagaagttacttacgggattcatatcattgtcaagaagctgcatttgatcagtagtttcatatccacccaaagttgtgcagaacagaagtttttgttcaattacataatatgtatcgccttcgaactcatgcataaacttcttgtctctaccaaactcaggatcataatctgctttaacatcttcagtatagttatccacagtttccttcagcgtttgataatcaatacctgctttttctgccacggtcttcaagtcgcctttgaccagaactggactcttctcgccaaccaaatcaaagaatgattgaacctcttccttggtaaagccatacttaagcattaattcatagaaacggtcccaggttctttgatccatgacaatgtaagctaccttacccttttgttcagcaatcgcatccctaaaatgcgtataaggtgcagattcgttaactattctcttaccatcagtattaacaaaaatagcccccatatcggtcgcttctttagttgaataagttgttagcttagcaataccaggttcaacttccaatccatgtggatataccttataccagtctaagttacgagtaaccaaattcatatttttggcaaaatcaagataatcaccagttgaagtcattggaccataatatggaatatcagtcttatgagcctgataatcacgtgcaccccaaccaccagcagctaaaacaagtgacttgaaattgacattaattgtctggtgcttgccttcagcggttaaagataccagtttgccagccttatctttattcaacttttcaacacgggcatctaagataatttgtccgccctttttttcaaatgcctcagccaccttagtcactagttcatatgagctttcactaggcatttcaatttgacgatatacactatgttcaactgtttgggtttccgctttttgataagtcaaatttgcaaattcagtaataaagtctactgccttcccaatattgttagctaatagctttgacaacattggataattagtaccgcggcattcacgagtaatatcttgaactagtctatttggcgaatccttctttgccgtttcaccaaataattctgcagaaactttagagccagttcctacaacatttgagccatttaaaatagttgctccacctaaatagccatttttttcaagtacaactacttttttacccatcgaaagagcacgacttgccgccattaacccggccataccggagccaattacagccacatcaacatttagttgcctttcttcatgtacgacttctggcttttttccgtcaagagcaatgttattttcggctaatgcttttttaccagaatctagcattgcttgagtcatcaatgatgccccagaaacagcgtccacgtcaaaactttgattatcaataatatttttctttaatttaccaaaagtttgattaaaaattgcaggagtttccgaattcttggttactttgacatcactaattttattgttttctaagtcaatctcaaaatcaatttgaccattgcgaccatctgcttgagctttaatagtttgtttggtcataaaaactactcctttacttgttctttttactaaaccgcttatattataaccacaatattaaatctaaaaaataaatttaatttgatattttaatagaatttttttatcaaaagcagtaaataaaagcgagtgatcattctcactcgcttgattctttatctaattttcatccttatttattagcgtaatgttgaataacttctggcttcaataccccaacataaggaaggttacgatacatatttaaaaagtccaaaccataacccactacgaattcattgccaacctttgaaccataatattctaattcaacatcggtagttcttctggcttccttatttagcattgcacaacacttaacgctcttagcgccacgtgccataatgtgttctttcatgaatttcaaagttaaacccgtatcaacgatatcttcgacaattaaaacatcgcgatccttcacgtcagttaccaaatctgatactatcttgaccttaccagttgactcaaagccatcaccataactagaaacatcgagaaaatccagttgatgtgctacgtccatttgtcgagttaagtcagtcaagaagtaaattgcacccttcaaagccccaacaactaccggctttttaccagcatagtcctcagttaattgcttacctaaacggacgcacatctcatgaatgtcatcttctgtgaataatttgtgatctataatttggtcaatattgtcgccttttgccatttaatctacccttcaattcaatttacatatattattcctaataaaaagaattataacatctttaaacaaaaaaagcgtcattttcaacgcttcctctgaataatttctaattttcatcctttgattgatcgtctttttgatctttatccttaatcggttcaacgataaaccagcgcataaagccttgttcgatactgtctaaggtaaacttatatccttcaagttcaattgattcaccctttttcaagttaggataatgttccatcatgtaaccaccaatggtaataatatcgctatcttgaaaggccttcagatctgtatggaagaaacgctcaaagtcatataaagtcgtcttacctgaaacatgaacttgaccatccttgtccttgataatgtaatcatctgaaacatcatcaatttcatccttaacagaaccgaaaagctcttcataaatatccttatcagtaacgatcccactagtaccaccatattcgtcaactactaagacaattggtgtgtgcttagaaatcatcaagtgcaagatatcttgaattggcattgattcaggtaccgtgataatagttctaataattcttgttactggtacgttgccatcaatttggctttgttgcacaatgtcgtacgcataaacataacccacaacgtcatctttatcattatcacgcacaactggaaaacgactgtagccttcttccaagtattttttcaaggcataggcaattgtatcagttgaatcaagtactgacaatcttgttctgtcagtcatgatgtccttagcaaccttatcgtttaattcgaaagctctttccatataagttaagtcttctttatcaagcgaaccaccatgaaccgcattacgcgacaacttgatgatttcagattgtgaataaacttcattttcttcatcagctggagtaaagcccatcaattttaagattccattggagctagtatttaatagccaaacgaatggataaacaatcgtatggaaaatatgaagtggcgtaacgatccccatcatcatcggtactggcttgtcaatcgcaatattcttaggcacaacttcagttaagacaacttccaaataagttaataaaactacgcctaagattgcactaactgacttgatgagtgaatcattcattggcgtcaaatggaaaagatcttccaatatggttgcgaatgtatcagccgagaaccaacccaagactacaccaaccaaagtggtaccaacctgagtagttgacaaatactcattcaagttgtgcgtcatatgcaaagcacgacgcaactttttcttatttccttgacccttagcaagcatatcttcgagctgacttggtctagtttgaactaacgcaaattccgcagcaacaaagaatgatgcaacgataaatattaataatgttgcaactaaattagttactatttgagctggactcaaagtattatcacctttttttacaaatatattactaaaacctattttaccatttcttgcctaaaatagtgcagttttacacaagggataacggttttttgtaatttattcgaccaccttgtaaatttcattaaacggtacacgctttggaataaatttaggatcattaatttcagcattcttgtcgatatagccaactgcaattgccattccgacagcttcatcatctggaatttgggcatattctctaaccaattctgggtatgaaaccattgagtgagctggcatcacacctaagccacggttaatggctaaaagcatgatactttgtgcaaaaattcctaagtcaaaaacggaccaagctggagatttcttcggaaccgttaaaaagataattgctggtgcattgaacattgttttattcgcatcattaaataattgaagcttatttctgaaaaagaaactttgggatgcacccatcgtagccatattacgacttggataagtatcccaatctagtgatagcattgaagcaaaatcttcatgtgcaacttctttatcatcaatctttttagctgaagcagccttaaacttgcttaaagcatcccccatcaaaacatatgcacgccatggctgagaattaagcaatgaaggtgattgctgtgccattttaacgattccagcaattgttttttcttgtaattttctattagtaaacttccgcgttacatgttccttttcataaacatccttaaaattcatttttcctcaattcctttttgcttatataataacaatctatattttattatagtaaaaaactgttaaaaagcttaattattgctcttttcttgctttttcttttctgctgcctgtttttttaaataagcactcattgcaagatcattttttcgcatagcaataaacgcagtaatggttaaagttaatccgccaagacaaatcacaagtaagccaatcggaaacaagaagtctgctcccttaggaataaatgatgccttaattacccagcatgctataccaattaacatcaaaactatacccacaatgactgccttagtgttcggtcgatatcttttcataaatgcccttctttcttaattaacattctaacagaaaaagcttagcttcaacgtagaagctaagccgaaaactagagaaatagtcgttaaatttttacatgagagaggggaaagttgactatttaagttcgatagtttgtactttttgggaatgttcaacactgcctttttcaatcggagtaactgacttaatcaggtccatgttggtgtagacaacgatgcagctgtcatcgtatcccttgtctgtaatcatttggaaatccattgtggctaagggttgacctttcttaactttatcgccttgactaacattcactgtaaacggagcaccttttagttcaacagtatcaagacccaagtgaatcaaaaactcaataccttggtcattcgtgataccaatagcatgtttagttgggaagagtgtggaaatactaccatcaactggtgcatagatatgattatccttaggcttgatagcatagccatcacctaacatcttagttgagaagacatcgtcttttacatcagtaattggcataatgtcgccgtcaactaccgcatctacttcaatacccttattctttttcttaaagaaattaaacataattaataacctctggatttctaaaattcaagtaataatatcaacataaagcttgcgagtaataaaccagctgcagtaagtgaaattgcgattattactcgactaacgccatcttgtgtcttcttcaaagctcttgctcgataaaaacctaagatagctaatactacgcaaagcaagttgccaacaaagagctgagcaatcatctgacttcccatcaagaagcgataagtctgtcgattgattaaaaactgcttgtggtttaacaacatatagtagcctagtatgaagtcaacgatagcaacgattgtactaatcgcaatcatcggctgcttcataatcatcatccgaatcgattgaccagaagcaccgcttcgtagtgcaatcatcgcccaaaacaatagtggagcaatgaaaagtacgtatgaataccaagtcaaaatcttcttagtatccaagtgcatgctttcggttattcgatcgataaagttgccaacttttcgtttactaattgcccacattgatctctacatcctctccttgactctgttgccaagctacatattcactaattaccaaatcaattaagaagtacgctggggtaaaggcaaccttcccgctcttaaagtcggcatcatcagtaaaggcaatcgttggaaaataaatgttgtgctgcactaatgaagctaatttattttgcttcaggttagtgaacgaaacatatttgaatttatcattcactagttccaacttagtgatttcctcattgatcgttttattatcacccgtaaacgagataataaacaaaacatcgcctttttgagcaaagcgtcccgcagcttttaactcctctaatgctgatggcaaaacagttgcatgcttgccaactacaaacaattcatgagccaaatattgtgcgattaactcttgttgccaaccagtagagtaaatgtaaattgtccctgcattatctaaatcgcgatacaagctattgaaatcacgttgtttgaaatacttcaacacgtctgaatttactttactaagttcccgcgcaaaattattttcaattttgattggtttttgcttcgattcggctaattcgaccaaatcaaatttaagctcactgtagccacttagtcctagctttttacataaccggaaaattgcggattcggatacataaagctttttagctaatttggctaagcttaatttgctacagtctctcggattatttagaacatattgaactatctgtttttcagaatcattcaacttatgactattgtcatagaccattgatctcaaatttgccataatacctgtgcccttatcaatatataatttatatattaatgataacacaagcgctttcagattatagcaattgtttcatttgatcaacaacttgatcggcatccaatccgacaacgatgtcaacctcgttgttatctttatgttgtacttcgtaagaatctgcgatcttcttgaattctgaatctggagcgaccttcttaggatcaacgacatgagttcttactctagttgagcaagcaatgacatcttgaatgttggagtcaccaccaagcaagtcaacgataccagtagctctttcaatataaggattatcttgttcagttgataccttagcgtcgccaccttgttgttgcattaaagtgttcatttcatcaagaacttgaggtacgtccaaacctacgataacttggatagccttaccgtggtgtacgacattgacagccttgtttgctttaaatgcggcatctgaagcaactttatttggatcggcaacagatacacgtaatctagtagcacatgaactcaattctgtaatgtttgaaggaccacctaataattcaaggtaagcagttgctctttcaatgtaagggtcattagcgtccttaccagcagcttctgcagccttcttagccttgtattctttctttgaaagaaggtgaacatcttgatcatcggcttcacgacctggagtaatgtaattgaacttctcgatcatgatcttgaagacaaagtaagtaataataccgaagataataccaacgataaattccatcacataggtcttccagtggtttggccaaagtggaatccagttcattgaagcgataccgatcgcaccatctgacatgaatcctcttaaaccaaaggcccacataactgtgttcatcgtggctgacaatactgagtaaactacccaaagaactggagcagcaaacaaataagtaaagtcgataggttcagtaataccagctaatactgaggttaaagcagctgggataagcaaagctgaagtttgcttcttcttgttcttcttagcagttgcgtagaaggcaagacagataaatggtactaagaataccttttcgttaccgtaaagttggaatccttcaactgaagcgatttgtgaaagtggtttagtacttgcagcgtattcagcaaggtgtttcaaccagtatggttgcaaaccgccggcaacaacggctggaccgaattggaatggaatgtataccaagtggtgaagaccagtaggaatcaatacacggttcaagaattggtaaatccaaacaccgataaatccactatctacgatgaagtgttgcatgctggtgatacccatttgaacttttggccagccccagcaggtaatgagtgctaaaggaatcattacgaagaatgctaaagcgtagacataagttgaaccttggaaagtaccaagccagtctggcaacttcttatcaaagtacttattgtgtaaccacactacaataagagcaacaaccaaggcacctaagatactagtgtcaagagtcttgataccagcaatgttagttaaaccatggttagtagcgttagcaacaatttggatcttgtcaaagttaggaataccaaaagctgcaccccagtgggtaagcattgcaccgatgaagtagttgtaagtcaagtaagcaataactgcttccatggctgctctacctctagccttgttggctaaaccgattggcaaacctacagtaaacaaaataccttcttggttgaacactgtccaaccaccagctgaaattgtgtcccaaactgagttccatgtagttcccgggttggcaataaaccaaacagggttattgaacaaactacctaaagctacgacaatacccgcaaacgagaacagcataactgggacgaacatagcggccccaaaccgctgtattttctgcatcataatcgtttacctctgaagaaaaaaattaaatcaataacttattcttacatctacacctgcatctacatctttatttcatcagatcaagtcaaccgcaaggtgctcatacaattgacttttgccatttgtgcttcacacaaatatttactcctcaaaaatgttttaagataaaacgtccagttgatatcaaattctgaacttaactctatcttagtagctagcttacatttttatttataccatagttttaagctaatgtaagcgttttttaaaactatgacttattgtttcataaagttaagatgatatttcatttcatgaaacgaaacaagtgataaaacctttttcctttccaagatgaactactttgcttactgaaataacacaaagtctggcataattaacggtaagttaaatgcacaggaggaattattatgacaatcaaatttattgcacttgataccgacggtaccttgcttaattcaacaggtaagattttgcccagtacaaaaaaggcagttaaaacagctttagaccaaggaataaaagttgctttatgttctggtcggccaatcgcaggattaaaacattttatggacgaattaggaattattggacctaatcaatatgctatcactcttaatggcgcaattacccgcacagcagatggcaagataatgactaaagatctagtttctaatcgactttatcgtaaaatgtatgcttttgctaacgagcatcatttaccttttaacgttgtttcccctgattcaaaaataattacaggagatcatgatgttgatttaatggtttatactcaagcttacgaaaatagtgcgactttatacattagagagctagatgaattgcctagtgattttgaaattgctaaaggttgttttgccactaaagctaagttgttagaccaatgggaggataaaattcgccaagaatttgggcaagagctgtatattgttcgtgccgacgattgcttcttagagctacttcaccctaatgttaataaaggaaccggattaaaagaattaactgaaaaacttggcattactccagaagaggtcatggcaattggagacgaaagaaatgatattaccatgtttgactttgctggaacagctgtttgcatgggtaatggctccgaagaagcgaaaaagcatgctgattatgttaccacttcaaatgacgaagatggcatcagcaatgcttttgagaaatttttatgaacaacctaaaacaagtatctgagaagtgattaatctttcctagatacttgttttattatttgttcaaatattcacgcaaagctggcaaaactttctccgcctcaactcgtccgacctcatacactcgtcgcatctcttttttatctgtttctaaagtgccaatttcaagcggaaacggtggacgaataataaaagcttggtcagcagcttcatcttttaccatctgatcaagcaccgcattataatcctcagctttagtagccaatttttttactactgcggggtatttccttaaaattactttttccagtggatagagcttactctgctttttgcgataagacttcggctgtgtagcaatgactacctttttatcacagttttgctgctctaaaaaatcatacggaattgaatcagatacaccgccatcaaagtaataatgcccatgaattgcaactggatgagcaaaaaatggaatcgacgacgaggctctaatccactctaagtcaacataacctgcatcatgtaattgatgataaaccggctcacctgttgcagcatcagttgcaacacaccaaaagtccattggattagtcataaatttttctttatcaaaaacatccaacttatcaggcaaaatatggtaacaaaagttagccgcatacaaattgcctgaccgccgccatgatttccaactagcataatatggtttccccgcaaagcgcatgttgtagcgcaatactcttcccttttgctccgacttcaagtttacgccaaaggcagcaccggctgaaacgccaattgctaaatcaaaggttatgtcattttctaaaaacacatcaattacgccagctgtaaacagcccacgcattgctccaccttcaagtactaacccacttttcatattttccctctttatcaaaaaagacctacgcttttcgcataggtctaatttattcttattttaattttacttcaagcccgaccattgccattcggttacttctggcatgtctttaccattgtcgcggatgtattggtggtgcttttcaagcaagtaatccatgtgactgatgaagtccgcattcttgcccttcaaagctgggatgctttctacggcatccttagctaggtcaaagcgatcaagatgattcaatacccgcatgtcaaatggggtagtaatatcaccattttcttcatagcagtgaatatgaacattgtaacgcttgcgagcaaaccaaatggattccatcatgctcttgtagccatgccatgcaaagattactggtacatccttagggaataatctgtcaaattcttcagttgacaagccattcttgttgtcctttggatccattaacttcataacatcaactacgttaatgtagcgaatcttgagatctgggaacttcttatgcaaaatatcaattgcggccaaagtttcaatagttggctcagtttcagttgaagcaaagacaacatccggcttagcacccttatcagttgaagcccagtcaatgtagcttaagcccttgtcaaccaacttttgtgcttcttcaattgagaaccattgtggacgaggctgcttagaagttaccaaaacattgatgcattctctatctttcaaggccttatcgccaactgccaaaagcgtattagtgtctgatggcaagtattcatgaacaagatctggacggttcttttcatacaagtgagtcaagatgcctggatcttggtgagtgtaaccattgtggtcttgttggaatacagttgaagttgcgacaaagttaagtgatggataatcatgacgccagtattgttccttagcctttctgagccacttcatatgttgagtaagcatagagtcaactacccggccaaaggcttcataagtagcgaagaagccatgacggccagtcaaaacgtagccttcgagaaagccttcatcttggtgctctgacaattgtgaatcaattactcgaccgctaggagccaggttttcatcatttggttcatgaatctctggttcccattgccgcttttgatcgtcaagcaattggaacagacggtttgacttggattcatctgggccaaagccgcggaaagtagttgggttgagcttagcaacttcatccaagtacttagcccattcaaccatgtcttgtgcctccatagaacctggcttgtcaaacttcaaagcaaatttgcggtagtctggcaagttaagccgcttaggatcaagaccaccgttagtgattgggttcatggccattctatgttcacccttagcagtgttttcagttacgatttccttaggtgaaccgtcttcattaaacaattcttccggcttgtagctttccagccaatcagtaagcatatcagcgtgttccatatcgccttgagcaactggaattggaatttggtgagcacggaagctgttctcaattgggttgccatccaagtccttctttggaccagtccagcccttagggcattggaagataatcattggccagtgtggcaaagtagcgtcattgttttcacgggcgtgcttttgaatagccttgatttcttcaatgacttcatccatggtcttagccatttcttcgtgaacctgcattgggtccttttcaccgtcaaaacgaccacccttaaagactgaaacaaagtgaggatcccagcccatgccacggaagtattcggttaattcttgatcgctcatgcgagaaacaatggttgggttagaaatcttaaagccgttgatttgcaagattggcagaactgcaccatctttaattgggttaatgaacttgtcactaaaccatgaagcagctaagggaccagtttcagcttcaccatcaccaatttcaacagcggcaataacatctggattatccaaaacagcaccagtaccgtgtgacagtgagtagcctaattccccaccttcatgaattgaacctggagtttcaggagcagcgtgagaagcaacaccgcctgggaaactgaagcgtttgaatagcttagccatccccttttggtcctgggtaatctctgggtaacgttcagtatatgaaccatcaagatatgagttagaaaccattacctgaccaccgtgacctgaaccctcaatatagaacatgttcaagtcatacttcttaagcacacgattcaagtgagcataaataaagttctgtggtgcaatagtgccccagtgaccaattggcttaggcttaacgtcttctgcaaccaatggggtcttaagaagagggttcttcatcaagaacaactgaccaactgacaagtagttggctgcgcgccaataagcatcaacgctctttaaatagtcttttgagtcataatcaactgccatcttattctcctttgagcatctaagagtgctctttttcatttgttcttttgtttacacttatatcataccaaattatctaaaaagttcaactatttttataattggatcctaccaattaaaaaataagtatttaatttaaaattgcatcccttttttgttgctatatcaaccttttaatgctttgatataagtatttagttgcttaaatactgataagtacagataaacaaatatcaaatactgacataatcagtgcaaaattattcattcatgttagattactaaatggagggcatgagatgacccaagaagaaagattaatacaaattaaacagttacttaaaaaaaagcaccaattatcaactagacagattgcagctcacttcaatgtatcatttgatacggcaagacgagatgtaattcatctaactgaaactggtcaagcaattagagttcatggtggtttgatggaaattaattgcaacagcgtacctgattttttagcaagaaatcaagtacaatcaccggttaagatgaaaatggctagaatggcaaagagatttgttcatccaggtcaatgtgatttcatcggttcatcaactacgttaaagcagctctgtccaatgcttaatggtattgacatgcagatcgtcacgaattcaatcgacaacgcattaagcttattagcaatagaaatcccatcagtcagattgttgggcggcgttatcaacaaaaagcagcgtttcatttattctgaaacagcattagaaacattgcgtcaaatccatttcaatactgcatttattggtggatctcgaatcagagatgacggcgtatatacaccaagcatggctgattccaaaattgtcgaaaccgccgctagtcgcgctaatcaagttgtattagttgccgaaaaatataaatttactaatcaatcctcttcgccatacatgtctgtccccctcaatcagatcgatgtccttattaccgacaccccattgcctgaggaattaaagcatcattttaatccaaaaacgcaaattatacctgttttaaaggagtgatagttatgttcagtctctttaaccaaaagaaacaaagcgaaagtcgtgaagtataccaagatttgaagaatttttataatagtttttttagcaatatctacaatgaaatgaatattggtcgctatcggcagattcgcgatgcaattgggcttgttcttaataagttcgacagtggtgatcatcctcttgaatacactagcaaattggtcatgtatattcaggctcgaattgccatgaatcacctgcatctaactcatgaacagcaagacctaatgaaaaagctaagtgacgctaccaaatatgtaaatctttcttatgtttatctgagtccgctcacttcggtagaacaatttgttaatatttaagtgtatctagaacctgctctagatgaaaaaatgaatccaaaaagaccgagtagctgatctgctcggcctttttatgcaataatattgttaaaagatatagattttttcaaaggaaataattatgacaaaattaccattcaaagttgttgctgtcgatatggatggcactttcatgcatgatgatcaaactttcgatcacaagcgctttgaccgcatcttaacagaattacacaaaaaggggattcactttatcgtttcaagtgggcgcccttataccagattacgcaaagattttgctggctttttaaaccgaatcgacatgattgctgacaatggctcgcttttgcttcaagataatcaaattattagcactcatttgctcacttataaaacaaccttagatctaataagttttatcaaagagcattattccaagagttcaattattgtcactgggatcaacaattcatatacaactattaatgcttctcctagttttaagcagaggatgaacttctattaccccgatcgaattgaagttactgatttagcagcggctatcaatccgcaggatatgattactaaaatcaccttaagttatcaatatgatttttccgcggaattagaaaaagaattcaaccaaacccatgccgagaagattcactgtacttctagtggtttcggtttgcttgatattgtgccttacagcgttaataaagggagcgctctaaaatacttcttacgctattttggtgctaaacccaatgaattaattgcctttggcgacggaatgaatgatgctgagatgttaaaactagccggttacagttatgcgatggctaatgcagaagatcaagttaagaaaatcgccaagtatgaggccccgagtaacaatgatgatggggttttagaggtgcttgattcatatttagctaaagtagagaaataataattactgtaaactaaaaccgtctgaatgagcaaaataaaaaagtagccaagttttcttaaactaattgacttaagaaaacacagctactttttatttacccaaattaacaaaggtattaaagttcatataatgataatgcacgcgcatatttgatacttcaaacggcgtcccatcatccaagaagaagatcccttccattacaccaacaggttcagtcggcttcaaatttagcttctgctgatcttcttcattcgatggttcaacagtgatattcaagaatgacttagtaacggtctttccctgttcatcttccaaatagttaaacaaagacttttgtaaagtctctggctttaattccggcacaattttaatcggcaaatatccagtctcaattaaaaatggttgttcatctaacagtcgcagacgcttgaattcataaacaaaatcattttcatttaaaaataagtcttccgcaatttctttagttgccttaatcacatgaaaatcaagcaacttaatttgttgttttttaccagggactttaaaagaatcagtgattccaagattcgatccatcataacgaaacattgcctgtttgcgcaaatatagtggattaataaaagttccactacctcgctttttaaaaacgatcccttgttgagccaacagctccagcgcacgcttcattgatgatcgacttacctgatagtgttcggctagactgcgttcatcaggcagtcgcatccccttatactgattattcaaaatattctgtttaatgtcatgcataactgtccgataaacataatctgccattattctcgtccttgatctgcctttttaatactatcaataaaccaagttgcaaacttatccaagtccacatctgtcgcaatctccgcattggcatgttcttggtccataaaatccattacgctggcaccataagtatattgcccgcgcaattcaatattcacatttgcctttttcattgtaaacatttccggatgaagcataattccaactgcagtcggatcataaatcttaattcgcggatcaccgtctggttcatgaatgttagagaaaagtgaatacaacatattacccacttcaccacatgtcttaactttatccatttgctctggtgttaaatgggccttatttccaatttcaagtggagcaaccttaactagcaatccactatgaaaaactacctgcgctgcttccggatctcccgcaatattatattccgcaaatgggctatgatttccgtgaccaatattaccacccataattacaatttccgcaatattttctttaacttcaggatattgcttaaaaagtaaggcaaagtcagttaatggtccaatgcccatcagagttattttttctggactacttttaatttccttagccatcaacgttgcagcaagaccaggttcaattaaagaatcatcagcttgttcaaattcaaagccggcaatccctgttttaccatgaaccgaagcagcactaatcattggtgccaccagtggttgattagcacccactacgacaggaaccttagtatgcaaaaacttttctaaatttaaggtattttgcaaggtatatttcagtgccacgttaccccaagtaggcacaatcatgcgcacatcaagttcttgtgcaaaaagactaatcgtcatggcagcaatgtcatcaatgccaggatcagtactgataattaaaggtttcttgttcataaaattatcctctcgtattaagtacttttataatagcaaaaaaccaaccaattaagaaagtggttggttttattctaataattatttttcttttttgggtttaatacgttgaatgtgttcttcttcatggtcacctaatactaatggcacacgctcaaccacagtatcggcatactccagtccgaaccaagatgcagggttagaagataaattctgcagccatactcttgcttcaaccatgaacttttcatagcctgtcaatttagttaatggactaattacgtcgttaacaattacaaaggcgaagtcccctacatcacgacccggtgtagtagtgaattgttgtggttgagcttcaatcgttccatcagcgatcaaatcatgaacaatttgccgcaaataaacatttacactggtttgttttctaaaacctaaatacaactgaacgttaattacattcttagtaccataagtattgaccgcgtattctgcagtatatggctcgttagtaacattaacagttacaaaccagtaagccttagcccgtttaggtctcttatccaaaattgaataaagcatttcgcgcttaatgaatttattatacttaaccttagccatataaactacattcgtagcgtaaactggataatcatcacagtggctcaactcagtcaacatatctgtatattcatctaagcgaacataagcattctgctcctcacgcttatcacggatcttattgccatagaaccacacgtacatgattgccaaaataaaaccagcaattaaaacagtgacgtaaccgccatgcaaaaacttagttaagcttgagaataagaacatcccttcaataaaggcaaagactactaagaaaatgcatcgtattgatagcgcggtaccttttttacccagatattcaaataataagatagttgtcatcaacatggtaaccgtgatggccagaccatatgctgcttccatatgatgtgaagttctaaataagaaaacaattgcaactgtaatgacacagatcatcttattaattgaaggaatataaatctgtcccttctcatttgaaggatagataatattcattcttggtaaaaattttaaactacttgcttcagctactaaagtgaatgaacccgtaatcaaagcctgagaagcaataatagcggcaatcgtagccaaagcaatagcaaacaatcttagactacttggtactgcttcaaaaaatggattgaaatcaccattaccagcatgataattagcattttgtaaaatccagacgccttgccctaaatagtttaaaatcaagcaaacaaacacataaggccaagagcccataatattacttttcccgacatgtccgacatctgaataaagagcctcagcaccagtagttgccaagaaaattgaacctaaaatcaaaatacccactttattagcaggactaaataaaatacgcaaagcatgaattggattaattgcatcaagcaaactccaatcatggcttaagttcataaatccaatgagccctaaaaaagtaaaccacaggagcatgattggaccaaaggccttaccaatcacactcgttcccattctttgaattgaaaatagtaaaaccaggataacaatagtaatcaagataaccatatcttgcgacgaaactggaattacatcaccaaagcgcatatttttcaatccttcaattgaagttgtaacagtcacagctggagttaatgtcccatcagctaacaatgctgctccaccaattaaagctgggataactagccatttagccctctttctaaccaatgcataaagagagaagatccctccttcaccatgattagtcgccttcaaggcaattatcacatatttgaccgttgtcaataatgtaacagtccaaaaaatcaacgaaatggagccaacaattagttcacggttaacattactaatcccaccattttcagtcacaatcgacttcataacatacaaaggactagtaccaatatcaccatagacaataccgatagcaattaaaaggccagtaaaagacaccttttgcttaccagatattttattcataagtttttatcctctatttcacttaaaaattgaaatttttactagtatagaaaaagtctagattttttgcaataaaaatatatctttttgaaaaataaaaaagaagatgaaatctccttcagtcacttaatttactttttcttatcttcgatggtgccatcactatgagcaataattacttcgtcacacatatccaggaacaagccatgttcaactacgccaacagtatgatcaaggtaatcagctaaaccatgaggtgctggaacaggatctgcagccaaatcaataatataatttccatagtgagtcacataacgttgattgccatccatacgccaccgaggctttaatccttcttgttcaaaacgtttaaagttttgttcacaagaaattggtaaaacttcaactggtaatgggaagccgcttaaacgatgcactaattttgattcatcaacgatccaaatgatcttcttagaattgattgctacatttttttctaaagttaatgcaccaccgccgcctttgattccatccaagttatcggtaacccgatcagcaccatctacagttaaatcagcttgatcaatatcggccaattcactaactttaaagcctaagccctcaagttgttttttactacggttactagtagttacgatagccttcagttttaagccgtcttcatctttgcgcttacctaaagcatcaatgaaaaaggcaacggttgaacctgtaccaacgcccaataccatacctgatttaaccatggcagctgctttttctgctgcttcttttttcaaacgatcttgttcttgcttgttcattattcatcatcctccatcgcctgtttaacttcctgttcagttggaattgaaggctgagcacctaaacgttgtacggcaattgaagatgcacgacttgcaattttagctgcttcttcaaagttagataggccagaatttaaattgcttaccaaatatccaataaaggtatctcctgcaccagtagtatcggctgcttcaactttataagtcggtattaattcttcaacatcgggagttgaaatatacgcacccttatcaccataggtaataaccacgttttttacaccaagcatgtgtagtttttctgcattagtggccagcgttgaattatctttaattgcaatgccagtgatcttggcactttcagtttcattcggtgtaatgatatcagtatattgcagtaattctttaggaatctcatcaactgcaggagctggatttaaaatagtgatttttttggcctttttagcaatcttaaatgcttcaagcgtcacatctagtgggatttcgaattgagcaattacacaatcccaactcttaatcaaatcaccagctgcacggatatcttccactgtcagttcataatttgcgccgtgatcaataatgatgtcattttgcccagcttcattcaacgtgatataagcatggcctgtctttgctcccattgtggtttgcacataagttgtgtccacgccataactcttgagctgatgcgtgataaaatttccttcactatcttcacctacacggttaataaagtaagtttcagctccacttttagcagctgcaattgcctgattagcacccttaccgccaccagcagtagtaatgtctagcgcattaattgtttcaccaggcttaggaaagtcttttacatgtaatgttgtatcaacattacttgaaccaataactacaatcttcttcattatgagcatcctcttctaaaaatggatttattcaacctcaattataacaaaaaacgtattcaaaatattgaacacacatttttgaaatcttactgtaaaataccaccattaacgaagccttttaagcgctcagcttcccacttcaatgtatctgaatcgtcaacttgcgagatcttatacccaacgaaatatggtgaagcatagaatcgtggaataatcttgcaacaagtaccttgaccatcattaattggatagaaaaataagttataagaatcaacaccatgtgacaagactgaacgcacatattgtgtgcccttttgaatcaaatcggcccaagtatccaaattagtattatcatgtgtcaaaatatttacttcttggtagccttgaactggacgcgctgataagttcatttcaactgaacccgaacgcccgacttcaaatcctttaaagttatcagcgccaatatcgtgatagccatctttatgatataagcccacgatctgcatatgtggatgagttaaagaaccatcagacttgggaccaaaatttttataccaaagcacactctgataacggcctgaattattcattttttgaaaacacttcaagccaaacttcatcaactcttgattatcttcacgcgtataagttgaaatatctccctggtgatcacttgattcaattaaaattgtttgattagtatcctttaacgtagggtacttattcttcaaccaaatcttatcgccatctttttcataaatattaattagatgctgcacatcacaaaaaggacagccagcattctgatttccttgccgattaccataatcataatcatatggcttacgcttaccaattgaatattcatacactaaaggattcttgtccatatttttcacctgctaaaccaaagatatcatacatttaacatcattttaacaattttatcggttaattgtgaacatttttattaataaagctaggaatagtacgtctatctatgataaactacctttgtaaaagaaatacatgatatacatgagaggaagaatcatgaaattctataaaaaattggtacttactggtgccgcagctttagctgttctaggcttgagtgcatgttcaaataataattctagttcatcttcatctaataagaagattccaactaagattaacaagaagactaccgttaccttttggtattcactaactggtaatgcgcaaagcagtttgcaaaaattgactaaagattttgaaaagaaaaatcctaacattactatcaagttgcaaagccaaggcggcaactactctgatttacaatctaagttggtttcaggtttgcaatcgccaaaggatttaccgacaattactcaagcttatcctggctggctttacaatgctgccaagaacaatatgcttgttaacctaaccccatacattaacaattctgaaattggctggggctcatatgctaagagtggcattaagaaagctctttgggatggtgcaaacatcaacggtacacaatatggtgttcctttcaacaagtcagttgaagtacttttctacaataagaccttacttgataagtatgatgttaaagtcccaactaacatgagtgaattggcttctgcatccgcaaaaatttaccgtgaaagtcaccacaaagtacgcggtgttggatttgatgctttaaacaattactacatgatgcaaatgaaggaaacttacggcaaagacttcaataagaacttaaactttgctgccaaggattccgttaaagccatcaactactacgctaatggagtaagagccggctacttcatgcaagctggtactgaaaagtacatgtcaactccattcaacaatggtcgcgttgctatgttcatcggttcaactgccaatgaagcttaccttaagcaaggacttaagaagggttacacttatggtgtagctgctcgtccaagcacgatgaacgtacaacaaggtactgacatttatatgttcaaaaaagcaaccgcaatgcaaaagtcagctgcgtttaagtaccttaagttcttaacttctaagtcatcacaactttactgggctaaacaaacaggctacatgccagttaatactgctgctatcaacgacaaggtttaccaatctgccaagaacagcaagataccagcaattattgccaagacctctaagaacctttacttcttaccagtaactaagaatgctactgccgcatatgatcaagttaatgctaacatgcaaaccattttagctaaggcaagtaaaaagcaatcatggaatagcgatatcaagactggtaaagataagcttgatgctgcttggaagcaataatttttcaaataaaatatctatcaaaaaaagaagttcagtattaattcaatgtcattaagttaagacattgacaaattgaatctaatctctgtagaaccgaatcattatgatttggttctttttttgcataaaataaaggcgaaaagaacctaccttttcgccctctgattaaattattaaaccttcaaaattattgccagaaagctggtgttaattatgaaagcccttcacagaaatattttagatcgtcttgatcaaattatcaatgatactggaaagcatattcatgattttatcgatgatcctcatgccttcactaggaagcggtttttagatgcagctacagtcattaaaactactattaatatgcaaggaaaagatttgaccagtgagttgtttagagcttttggccaaaaagctattaaaaataacgataaagtagtcagtacttccgcttatgtccaacgcaaaggtcagctttcacccgcatgttttaagcatattctaactgtatttaatcagaatttatttaatatccagttatttgatcataaatatcgtatatttgccattgatgggtctgattttaatcaaatctggaatcctaaatcagagaatatcgttggaaatctcaatcataaaggaaagccatattgccaaattcatgttaatgcactctatgacctgttaaataatacttatcaagactgcatctttcagcctaagtcaaagatggatgaacgtaaagccgccgttcaaatgcttaaaaagctaaattgcggaccatatatagttactatggatcgaggttataccggctttaacatgattgaaaattgtaatcgcctgcctaactgttattatgtcatacgtactaaaacgggatatggcgcatttaaggaagtagctgagttgcctaatcaagagtgtgataaggatatagcttgctgggtgactacctctaattattattatgaaacccataaggctacagaaaacgttcatttggttaaccatcattaccgtcaatatataaaatatcggtctaaaaataccaaagatggcagctgggactttggagagttatgtacaataaaatttcgtgcctgtaaatttagaattaatgatcctaaatcaggcaaagaagaatgggaagttgttctaactaatctaaatagagccgattatcccttaaaaaggatcaaagaaatctaccatttgcgctggggcattgaaacttcattcaaaaagttgaaatatgctttaggtagcgtacagtttcattccaagcaggatagatttattgaaatggagatctatgcccacatgattatgtttaacgcagtcagtcaaattgatgctcaagcatatgtaccacaaaaaaaatgcaagtatcaatatgcgatcaatttcaaacagtcatgttttgtcatccaggctatgtatataatttcttcttcaactgaaatctttaaaaagattcttattcaaattagtcattacacaattccgatcagaccaggacgaaaagacaaaagaaatctcaaacccaaatcagctgtatattatttatatcgtgtagcctaatttctaaacaagatttgggtttatttggcatgaaaaaagagcattcaaatgcgataaatcgcaaatgaatgatcttaaaagtccaagtcgataatttgtcaatgtcttaacttaatgacattgagtattaattgaacttcttttttttacctaattatttactaaaaatggatattgaatttgatcattatcagttacattcaacttgtaacgagcacgatataaagccttttctaccgctaattgccctgcagttgtggccattgcaatcgaatatgacttgtgtggtgaattgatcaggatttgactgatagaatgcttaatgtatgactggattagaatgacataattcgattccttacatgcacgtaaaacattagaagcctgtttcatctcgataattcgagctactccattgtgtgcttcaatcaccttagccaagttagaggttaagctcttgtctcctactacaacggtaactcgttttttatcgaggtcaaaatcaattcgggaagcatagtcttcattttgcttttcagacgactgcttctcctttttttctaattgatgcaataaagacttgtgtctacctttagtcttgtgcttttccgtttctttatttttatccggcttttccttcttttctggaatagtaacttcagcttcggcataacgccatctaaccctaatgaaggatggatcactgactcgccaaacaatactaatcaggtcattttcgtgtaagttaaagtgacttacagtattcatgtctaagtataaaatagctttttcaggatttacttgacttaggtttttgccattagagtcctgcttgatgtataaaccaaaagaatcacggtgaactaccgctggaccaaattcgataatttcctcatctggcgcaaaagactttgcatgatgctcaactttaataattggacgattgccactgtcatttaagtgatctagcaaagtaactgtatcaccgttttccagcttttcaattctagtcaagtgttcattaaaatattgtactgaatgaccattctcatccactgcttctgcacctagcagcttacgcctaatctcatattgtttttcctttggtttagccacaggaattattttcttaaccacaggcttaggaataggagttatggtcgcatatttgtttttattctttaaaaccgtaggactcagagctttagcagcttcttcttttttagctttttctttttcaagctcttccttcgtttttttcggctttattttttctacagtattttcatcattttcttttttagtttctatttcagttttattttctagcttattctcagtttttatttctggctcattttttacagcctgatcagctttttccgcaattttaacgacttcattcttattctcaggtggattgcctagtactgcctggttatatattttactaataattttcaacgcaatcattgactgcttcagtgattggggatcgctccccgtcgcctgcattaaatcaataatatcttttctataatcaatcgtcatatatttaccttcttatttcttaaatatgaatattatacaaaaatttttaatgctaatctaattctttatagatttttatattatttttcctgtaaaaccattataataaaagtagttaaaatatcatttattaaatgagggagactactatgaaaaagaaacttttacttttcgtatcctttttagccggtttattgttcttggtatctacaccaacttatgctagcaagcttcctaaaggctatggtattgctaaaacctttaccacaccaaaagcaacccgtggcacctggtattatcgcgaaaagggtgataaaacaatttctaaggtaaagatcactgctcatagcgtagatggtaaaaagctttacgtaccttcacaaaagttcttcgagaaaaatgtttacaacgtttcagctaagaagcgtaatcagttcatcaaaaaaactgaaaatatttatgctgcagctaactataaaaagggcttcaatgtcaacaattgggttaacttagctggtgatggtgaatactacatccctgttactagaactgttaacggcaaaaaggttaaggcattaagaatagctactggtgctggtccttatactgctgcatatgcatacaaaactaaggcattggttaaataatcattgtctaacgaaaaagcaaattagcataatttgcttttttcttttaccgatttttacttttccgtatttctccttcaaaaagagcggtcaattttgccaaactcttatgatcaggatagcgttgaactaattgctcaattttatcggtagctaatttttttacttcttcggctgagcccattttctctaaaaaatctgccaaatcacctgaacgagcaagtaacttacgctcactacgactttctgccagaaaagcttgatcaaccttacgtaacttcaaactaccatctgcattaaagtgatatcctccccacatatgctgcttaattggttgcatcggttcgctatccacataacacaattttcctaccatatggtgcgtctcagtaattcctaacgtaaccgggtcataaatatcgacatagttaaaaattttctcccgcattttagccacctgacgtcgttctgttggcgttaataaaagccaaatattggttccttcatacagataagcagctgcaattgcttctggatgacgacaattagctaaagcaaactgagcattaattgaacctaacgaatgaccataaatataaattctactacctttaaattgattaattgtctgattcaataagtgagcagctgactttaattggctaggaatcgtccgttttcgtgcaagcagtgcttttaaaattggtagattagttttaatccattcatcacgccaagtttgtggagtcccctttttaaaaccatatgatcctttaaataagattgttatttcattcggacttgaaatgacgaaggctcgcatcccatccttagcataaacattacgacaaacagttccaagataatgttgatctattttgatagtatcacccagctgcaattcatcatatgtctttttagttaattcaactcgttcacgatctgttaactgtgcatttacactcataatttttcctaaaataaaaaactaactcttactattatgttagcatgagttagtttttttggataatttgagcctttaatcatattttttctgcaagtaatttgcaatcgttgacaagcagaaacagacaataaagtacatgattgcaataatcacatacattggaattaagtaagtcgtgttctgactgtaaataatttgtgcgtggtataaaagctctggcaaaacaatgatagttgccaatgaagtatccttaaccaatgatacaaattgtgataataatgccggaatcatattgtgcaaagcttgtggcataattacatgatacatagcctgaccatacgacatcccgttggaacgggcaccttccatttgacccgaatcaactgagccaattcctgaacgaacaatttctgctagcattgcaccttcaaagatgactaacgctgcaattgaagctgtcgttggattcgttacaatacctaattgaggtaaaccaaaataggtaaagaagatgatcaacaatagcggcaagtttcgaataatatcaataataaagcctacaattgcagacacatacttaattttcatgtagcgaactaatcctaagattaatcctactacgaagcttaatgcaattgaaattaatgaaacataaatcgttacccaaagtccttgtaataagaagcgaatatcgacccatgaatatgcatgaataaaagtttccattctctatccccttcctattagctgactaattttttctctaaatgacgcatgtagtaactaagcggcaaagtcaagatcaagtagaacaatccaacaataatataagtatcaattgtttggaacgttgagaacgcaatcaattgtgcttgatacatcaagtcaaaaccggcaacaaaggccaaaactgaagagtttttaaccaagttgacaaactggttgcctagtggtggaatcactatcttcatcgcttgaggtaagatgacataacgcatggcttgcacataggtcataccgttggagcgagcaccttccatttgaccagttccaattgaattaattcccgcacgaacagtctctgcaataaacgctgatgtataaagcgttaaaccaattgtccccgcttgaaatcctgacaatttcacaatataacgtggaacgatcaaataaaagatcatgacaattaccagcaaaggtatatttctaaaaatcgcaatatagatcttcgcgatcacttggccaaatttagatggtgctacctcaagcaaggcaaaaatcacgcctaaaatcaaactgaaaactagagcaataatactacttaaaatagtattccaaaaacctgttaggaagctgccccagttgttagtaataatttgccacattatttcaaaaccccctttagactaaaaccaggaattccagcaaaccactttttaatcaaacggtcataagtaccattcttttgtaattcattcaaagcttggtcgatatgatcagccatttgtttttgtcccttattaacagcaattccgtaaggagcattactatagacgccgccgactaacttataaccaggattttcttgagcgataccggcaagcaagccgttgtcagtagttaatgccacaccttggttagccttcaatgcagacattgcttgaccatagtcatcatattgcaaaatccgcgctttaggggcatacttatgtacatcatcaactgcggtagttcctttaacggccaaaacagttttgccttccagatccttaacattcttgatcttactattattaggcactaacaaagatgaaccggctggaaagtatggcttagagaaggttacttgcttggcacgttctggtgtaatagtcattgtggctaaaacagcatcaacatttccattttttaaaagtgggattctagtgttggcagtagtagtaacaaaatcggttttagcatctttacctagcatttgcttagttaaagccttagccaaatcgatttcaaacccttcaatatgtcctgtcttaatgttcgttaagccaaacaatctagtatctgctctaacgccccaaacaattgtcttactttcttttactttttgataaacattattgctagcatgcttgccacaagcagtcaaggcaagtgccaagattagcaataagggaaagaaaaaaaatctttttaattttttcatggcgtgccaccttaatctttagaaatgatcttgcttaagaattgacgtgcacgttcagtatctggatgagcaaagaattcttctggcttgcgatcttctaaaatatgacctttatcaaagaaaattaagcgattgcttacttctctagcaaaacccatttcgtgggtaaccacaaccatagtaatgccttgttcagcaacatatctcataacttctaaaacatcttcaatcatttctgggtcaagggcactagttggttcatcaaataaaatcaccttagggtgcattgctaatgatctagcaatcgctactctttgtttttgtccaccagataattgatgaggataagagtcaattttatcggccatacctactttttcaagatattgcatcgctactttacggttctcatcatcaggacgctttagcacaatcttaggcgccagcataacgttctctaacacagtgtgattattgtagagattaaagtgttggaataccatcccaacatttttacgaatcttattaatatcggtctttttatcagccaaatcatacccagttacaattaattgaccgctattaattggttccaagccattcatagttctaattaaagtactcttacctgaaccagatggaccaataattgaaaccacttggccttcatcaatctttaagttaatatctttcaatgcatggagctttccatagtacttatcaacatgcttaaattcaataattgctgtcatggcttctacctttctttcctttgtctacacaatataattattttactcttcttaaagctaaaactaaatattttagcaattcaaaatagtataatagcctgctaatcttataaatttgttcggttttagcaaaatatatttgtatttagctagattaaaataatcatattaacgctacttacgaatttattaactactaactttcaggataaagaaaaagcccatcatcccctctagtttgggacgaaaggcttttttccgcggtaccacccacattgtctaagtatagaccaactcatgaagcaccgacatgcttcaccggcgtggtaacgtaccggagacgtctcgacctactataagaattgttagttcggtgagctgctaaaagtgtttttcaatagttcagggtctgctggcttttcactaacaccaactcactgctaagaataaactacctactcgtctttttcatagccttttaatttatttatatgtatttaacattatttttcaagaaaatgcaagggaaaataatttaaatcgcaaatgtatccgtttttaattaaaataaatgctgttaatattcggaaaatagcttagaatattagtgatacctagaaaattaaaggagtttgatatgggaaagcttgaaaaacccgttattattggaattgctggtggttctggtagtgtgaaaacaacaatcgcacacgaaattgccgataacatcgatgatcaagatcgaattatgatcatgacgcaggattcttactacaaagacaatactggcgtatcaatggaagaaagaatgaagatcaactacgatcatcctgatgctttcgatatgccactacttgaggcacaattaaatcaattgatgcacagaaagccaattgaaatgccaacttatgacttcactgctcatcccgtagtgatgaaactattcacgtcgaaccagctgatatcattattctagaaggaattttggtactctttaacgaagatatccgcaatttaatggacatcaaggtttacgttgatactgatgatgatatccgttttattcgtcgacttgaacgtgatatgaaagaacgcggccgctcacttgattcagttattaatcaatacttgggcacggttaagccaatgtacaatcaatttattgaaccaaccaagcgttacgccgacatcatcgttcctgaaggcggcgaaaacgatgtggctatcgatatgttaactactaagttgcaatcagttttaagtgaataattatcgagatataacaaacaggcaagctaggaataatacctaacttgcctattttaatactctaaattatcttagtttttcttatcatcctgtgcattagctgcatccaaaatacggttatatttcttagcaaagaataccaaaagcaaaacactggcaataacataaataaccgctgcaatgtagtaagcattagcataaccatcttgcgtattaaacaagtaaaattcagtgaagagaccatcaataactccaacgatagcataggcaatttgaactacaccagtaaaggctggacgcaagtccttgtcaacaataaccatctgaacttcttgctgaatcggcatcgtggcattggctaaacctgttctcaagaaaagcagaattgcgacaatgacgaataagaaggctccgctacctaaccggcgaccattagctaacaaaagcataaccggtacacaagttaatgtacctgcagcaaccgacacgattgcaccgagtttcttttccaaaaatggagcaaagaagtaaccaattagcattgctgcttgaacaaaagtgttgatggtagaagtaacatcacgtggaatgtgcaaataactattcaaataaattggcacataaacggcaactaaacgagcaccaagttggataccggcaatataaacaatccacatcaatgtcttcttgctcaaaagcttcttatacatggccaccttttcaactctgctaggttctttatcatctgcagtagaacgatagtcacgtggtacatcgtgaataaatagggctaagataaaggctaacatcgttacagcagctgtaatataaagtaaaattctgtatgaatttgtatagtcagctaaagtttggccggttaacatttcagaattacctgatagaactgaagcttcgtgataaggaatccctctaattaagccaaagaaccaaacaacagccttcccacctaagaaagtacaaattgtctgcgtaatcaagttaacaatcataacggttgagaacatcttagttctaatcttccctggaacatatgaagtccacatcagtggatacatcaaatcataaaccccaattgctgtccaagaaatagtataagcgatcatgatgataatttgattggttgtgatacaggttaaggccataaaaattgccgtcattggtggcaagatcagcaaaatctttcgatagccccatttatgaaccgtcgcaatcatgactgacatcaaaattgctgtcgccgcattaaaaatgtttaaacctgaaatcaagtgtggcgctacaatcttgtagtaagacaaggctgcatcattcgtaatccctgttactgcacctaaaataccataaatccataagtagacaatgacattgtgtttataacgtggattccaatttttaatcgcctcatcctcagcttccttttccgcattgcttcgtcgagccatataagtccccttccccttttatgaaaacgtatacaaatatctaatttaatcttagcacctatatagtattaataaagtgtgtgtatacgaaaaggtattgattatatgacttaggcaagccttggctttaatgctttatcaaatagattagtaatcaattttactagtacaccatcaaatactaatgatgaaatcatgctgacaataaacatcaaaatttggacattaatttgatagtgactccaaccaaataagaagtagctgggaataaagccacccaaattagcaaaaaaggcaccggtcaagacacttttccaagagaatctttcataacgttcctttttagggaaaaagccaatttcattcattgccccctgaattaatccttcaaaaattgtcaaagctccccattgtccgccgatcgccatttctacagtcgcagccaataattcaccgattgttcctgcacccttagtcggtacaaaatacattgctagtggtgccgccatgtaccataatcctgtaaaaatattatccactactggtgcataacccgtgggcaaaaaactcaatttcaccaagttatacacattattaaaaccataagtgtaaatcacgcccatgattattccaattaaagccactaaaataattgactttacattccattttgacgatctagtaaacataaaaatgctccttactaacatactgtcagtaggagcacacaaataaaagttaattctcttgttagcactttcccttgcgcaagtattatcttgttcaggttcgaagggtattatctcagcattacgcacccctagtgacatttcatttatttatcaattaagtcaagtatagcacattgttaatcaaatgccatttgatctgtgtaaagtttgtaataaaatcccttttctttaagcagtgcctcgtggctgccttcttcgatcacattaccatcttttaacacaacaatcttattagaattcaagatcgtctttaaccggtgagcaatcacaaagcttgttcgtccagcaatcacagtatccattgccttttgaatcttttcttctgttaccgtatctacgttagaagttgcttcatccaagattaggaatggtggattcgttaaaattgtccgagcaattgacattaattgcttttgtccagttgaaaagattgagctagcatcgctaacttgagtatcgtaaccatcaggcaaagtctcaataaaatcatggatattagcctgcttagccgctgagatcacttcatccattgaagcattcggcttaccataacgaatattgtccgctacagtaccagtaaataagacagagtcctgcaggacgatcccaacattatttcgcaatgatgttagttgaatatcacgtacatctgtcccatcaaaggttactttacctgaattaacatcatagaagcgatttaacaggttcataatcgtagttttacctgaaccggttggtccgaccagagccactgattggcccttatcaaccgaaatatttactccgtgcaaaatttctttatctttattgtagccaaaatgaacattttctagcttgacaccatgattcaaaccactaatgaccttaccatttggcacttcgttttcatctttttgttcttcaactgtagctaatcttcttgccccagttaaagctaattgaatcatggaataaattgaagtaatttgcgtcaaaggttggaaataaacttgtgaatattcaacgaaagttacaatcaagcccaatccaatagcctgagaaatttgaccggaaataatcatccaagaccccatagcgatgacaattgccaaattaagtaagttcaatccgttcatcaatgggaataggattcccgaataaaattgccccttaaacaaagcgattcttactttattgttgtagaccttgaagccatcaaccgattcttgacgcaaaccattggtaataatcaccttttcaccattgatctgttcggtaatataaccatttaaatcgccaatttcatcttgctgcttatcgatataaacgcgagcttttttcattaaaaggacactaataatcaaaatgaatggtgttgtcgcaatcgtagtccaagccaaagtactattaatcgtgaacatcacaataattgttcccacgaacataattccctgggaaataatttcaaaaatcgcattgttcattgcgttgaaaatattatcccaatcggaagtaagtagcgataaaagtttaccatcctgatgagtatcaaagtagcgcactaacatccgttgaaacttggcaaatagattctcacgcatgtcattagttgaatccgcattgaacttggacattaccatccaagcaataaaaatcgctatctggctcaataagtaaaacaagaacatcgaccataacgcgctatagaacgtgttcatggatgctgtacccttttttaaatcaaccaaataagtagttaaagcagtaactgaacggcctaaatatgtaggtgccataacctgtgcaccactcgaaatcagagaaaggataactacaatagtgattcccttccaataaggcttcaaatacttagcaaaatagcgcaatgcctttttcgtattactcatttattcatttcctcctttcttacctttttgtgtcttgaagatttcttggtaaaccagcgaagtcttaagcaattcttcatgcgtaccttgtgccactaatttaccgtcatctaacactaaaattgtatcggcattaatcactgaaacaatcttttccgcaataataaaagtagtagtatcaggcagctcatgctctaaagcttgctgtactttcttctcactttccgcatccagagcagaagttgaatcgtccaaaattaaaattggtgctttagcaatcaagccacgtgcaatagatagacgttgcttttgcccaccggaaaagttagcagaacgctcctctacttcatgatcgaaagaatcgttataacgctcaataaattctgatgcttgcgccatattggcagcacgctgcaattcatgtaatttagcctgagcattaccttgacgcaaattagatgctattgtacctgagaaaagaactgctcgctgcaacacaaaagaaacagttttgcgtaatgcagcttcagttacatccttaatattttgaccgccaatttttactttacccttagttggatcatataaacgagcaattaattgggccaaagttgatttaccagcacctgttgccccaacgataccaaccatttgacctggcttaatcttaaacgaaatatcctttaaagtaggatcatccccatcaggataagtaaaggaaacatgatcaaactctacgctaccgctaagaggtgcaaccgaaccactttccacaaacttgacatctggttcagtctccaatacctcacgaatacgtccaagagaaatattagctcttgaaaattgcattaaggtcattccggcaatcatgatcgtaaatagcagggttaaaacatagttcacgaatggactgactaccgcaatatcacttggatgtgccgtaatatttttaccaattaaataaacaattaaagcaattacggtataagcgatcatctgaaaagctggcataattgcagagaaccagtaaccaatcacaatgttgtagtcattcaattggtccgaagtttgatcaaactttttaatttcttgtggaccttgattaaatgacttaaccactctcacaccttgcaatgtttcttgtgcttgattagaaattcggtccatcatttcttggaatttggtaaacaaactattcatttgtcttaaaacgtaagcgccaaaaccaaaaataagtgcaaccatgaccactggtgcccaccagaagcgcggaataatcacgatacagaagataaatgaaccgacaattaaaatcggcaaccgcaacatctgcataaatagctgcatcatcatgttcattacctggttcatatcgttgatcaaccgtgtagttagagaacctgctgaaaatttcttaatattaccaaaagagaacgtttgaatcttagcataggtatcttcacgtagatcactaactactccttgtgcaattttcgctgcaaaataaacgttaaaaatacccgaaataattgcaattatacctaggactactagccagattccatcagacaagactgcttgcttctgattcgccatcaatgccttttgaatattttccaataatttaggctgatataatccagaaaacgctgaaactaagatagcaataattgcacaaacaacatcttttttataacgctttaagtatggaagaattattttaaagttttccatttttactcctttcttcacttaaaaaatgccaaaaagtagtgctccattcttctgaaagcttagctaacaatttcattttgtcagttcccatggcttgagccgttttttcctctaactcaaatagaggacgcaacctgtcataagcatatttccgccctacttcggtaagctggcaaaatcgaactcgcttatcgctaggatcaacagtcatcgtgatatgatcatgatcacgcagaatcttaattcctttgttaatcgactgcttgggtaaatcactcagatttactaattctctttgtgtcaattttccccgaatcagtaattcatacatgattaccactaaatagtcaggcaagtcatgatcctgctcccattggctataagcacggctgccatggataattgatagatttaatttttctgtctcactaattttcattacttcaccaccatatttagtctacatgcataccaaatatattagtatgcacatggactattgtcaaatcattttgtcaaaaataagactataattaaagtaaagaaacaatttttgcatctaaatttcaaattggtataataaaaaaatcatcaagtaaaacaaggcagggattatatgcgtaaaaagtttttattaataatttcaatagtggtcctgtttgctttgccattaagtggctgtaagcaaaacaaaaagcaaaacgtttatcaagcagttaaaactagtaaaaccattaactggggcgtcaaagccgacacgccattattcggctcaataaatattaaaacaggcaaacttaatggctttgaaattgatttagctaatgcattaacccatgaaatgctaggcaaaaatgtcaaagccaatttcataacaacaacggccaacaccaagattcagcttctaaaaaacacgaatgtcgacgccgtcattgcagcaatgaccattacgcctgaacgtaaaaaacaagtcgaattcagtcacccttactttcctgctggacagtcaattatggttgctgacagtagcgccattaaaaatgctaaaaatttgaataacaagaaagtgcttgtagttaaaggaactactgccgccgatgctatccatcaagttgctcctaaagcggaaattttacaattcgatgattacggccaagcttttgccgcattaaaagctggacaaggagatgcctttgtaactgataacggaattttagctgggattttgcgtgatagttccggctataaattagttggcggcacctttaccaaccagccatatggtattgcagttaataaggggcaaaatgacatgctcaagcatatcaacactgcattagcaaaactagaaaagaatggcacatataatcacctagttaaaaaatggtttggcaacattcctggtatgaacattaaagaactagaaaagaagtaagaaaaaggctaagatcaaaattttgatcctagccttttcgcttatttagcaatgaaatcaagtaaagtaaacattacatctttatttttctcaggcacaccatgattaataatctctgtaggcgtttgatgtaaatccttattttctaaagcatatgctccatcattaatagcaatctcacgtacattatcaatttgcggttcaaagtggaactgcaacccaattacattatctcccagtaaaaagccttgattcttaactagatcactagagaataataacttagcttcggttggaatttcactcatttgttcatgccaatgaagagctgttaacttatccggaattcctgtaatagtctgatcttgcaaataaactggtgcccaacctacttccttagcgggtgcatcaagtaccttatagcccaaagttttagcaatctgctggctaccaaaacaaattcccaagatcggcttgtgttgatctaacatttgtctaatcaacacacgttcatttttgacccaatcaagatcatcattaggactgtttggactgcctaggactactaatagatctgtttcatcaacagttggcaaaataccaaaattccctggatggtaaacgaacatttcgttatctctagcatggcaccaggcttgaatagaaccaggtccctcattaggtgcatgctgtaatacattaacgcgcataaaatccctttctcactcaacaatatttttgtttttcattttatactcaattctagtggtaaacaagaagaattcagttaatcttttactatatctttagaaactatatgtcaccttatatgatataatgttatacatatttttacatctggaggacttttatggacaatcaccttaaacgcagtattggcttaggttctgcactttcaattatcgttggaaccattatcggttctggaattttctttaaacaagcttcagttttagatagcgcaggctcaacctttatggcacttttagcatggattttagctgggattatcacattaaccgccggcttaacgattgcggaaatcggtgcccagatgccttatactggtggactttacgtctatattgaaaaaatttacggccgcgttttaggttttatggctggttggatgcaggctattgtgtacggtcctgctatgatagctgcagttaccggttttttaagtattatggtgactaatctctttggcatcggcaccgaatggcgtattcccattggtttgatcactatcatcgctatcggtggtttaaactttttagaaaataaagtcggtgcagcctttgctataatcactacaattgctaagatgatccctatttttgcaattatcttctgcggcatctgctggggtgagcaaaacgctgtcgcccaaactgtgactgagctgaatcgatcaacaggtggtcttggcgtagccgttctcgctgccctttttgcctatgacggttggatctttattgctaacttaggtggcgaaattaagaatccacaaaaattattacccaaagcaatcatcattggaatcactacagtattagtaatttacgcgttaattactattggtatttttagtttcatccctgccgataaaattcatgcattaggtaaaaattcaaccacttatttggctgacgctattcttggtccaattggcggtaaagttctatctgtcggcattattatctcaatgctaggcactctcaatggagaaatgctcacctttcctcgtattatttacgctatggctaagcgcggggatttgcctttctcaagatttttatcatacgttacacctaagggaaaagcaccagtcattgccactatgctcttaattaccttaactggaattatgatgactttcttcgatcctgattacctatcaaatctctgcgtcttcacaatttatagtttctatgttttagcattctttggcttattcattttaagatacaaaaataaggaccaacgtcctttcagcgtaccgttttatcccctaattcctttagtagcaattgcgggcgggctcttcgttttagtcagccaattcttcaatgatcccgctggcgttttgctttttactggaattaccgctgtcggctggccaattttctttttagttaaaaagatgagcaaagcacagaacacgattatcgaagactaaaaatctcaaatttttcttgttcatttttaataattatgatattctaattaaaattaatttaggagattcaattatgatttatcaagacaccacattggcatactcatctagctcaagttccaactgaacttgagtgattttggtgtacgtaaatcagcagccggattcactcaatcgtttctagacgataaggtgaatccggctatttttgtataaaggagaaaaaatggacaacaagcttaaacgcagtattggtttcggctcagctttttcaattgtaatcggaactatcatcggctctggtatcttttttaagcaggcttctgttcttgacagtgcaggttcaactacaatggccttactagcttggatttttggtggtctaattaccttggctgcaggtctcaccattgccgagatagggggcgcaaatgccctacactggtggtctttatgtctacattgaaaatctctatggccgcattttaggctttatggctggttggatgcagatcatcgtgtacggtcctgcaattattgccgccgttgctggttttatgagcatcatgatgactaacttttttggtttgaatcattcatggcgcattcctttggctttaatcacagttttagcaattggaatcatgaatttcttcgaaaataaggtaggtgcaatcttttcagtcataaccacgattgccaaaatgattccgattgctgtaatcaccatttgtggaatctgttggggtcaacaagatgcgattaaccagactgtagcagaggttagccaacacactagtaacttcggtgttgctgtcttagcaactttatttggttacgacggttggattttaatcgctaatttaggcggcgaaatgaaaaatccccaaaaattattacctcgagcaatcattgcaggaattacagctgttttggctatttataccctaattacaattgggattttccgcttcatccccgctaatcaaattcaccaactaggcgaaaacactactacttatctagctaacgcggttttcggtgcaatcggaggtaaaattctttccattggcatcatcatttcaatgatgggaacattaaatggaaaaatgctgacctttcctagaatcgtttatgccatggctaaacgaggagatctacctttttctaaatacttagcctatgttactcctaaaggaaagtcacccgttgtggctactttatttattgtccttttagcccttttaatgatgattttctttgatccagaccacttatcagatctttgcgtctttacagtttattgcttctatcttttagccttctttggaatttttatcctaagcaaaaagaataaagcagagcgtcctttcagtactccactttatccttttgtgcctataattgctattttaggcggtttatttgttttaatcagtgaattaattaatgatccagctggtgttttgctttttgctggaattgtcattatcggcttaccgatcttctacgccgttaaacgcatgaataaacatcgcttgtattaaagcgacttttctacactgtagcttgcacgccacaattcttccattttagctaaacgatgccaatctcctttttgacacattgtatacaaggcatgagcaggatcataagcaattggattgccctctgcttcttttaaataagccccaacaatgctgattaacatcatccgaaagcgttcaatctcattacggctaaagtaagtttcaaaatacttagttactaagcaatcaaccgttgcatgcgaagctttgcgcaaagaagcaggattcttacgatagttatacaaagtataagttgaaattccagttgctttacttaaactagtaatcttaacattacggtcagttattagtttctctgctctttgtacatcggttaaaattttgggatgcttaaagtgagctggcattgggatacgtttacttaattctgcaattaccttttcaacagcttccttcatttgctgcgtagctacttcttcgtttaccttgtcattaagcaattttcctactacaaacgtatgatcagtcacttcataccttttagtaactgcattgtaaaaataaccttcaatacctgtaatcttaactgcatcagttccagcttttgcatagtcaaaaaagatgtgttgctgatcaccagttaatggtgaaaatggcaaattatctagcgtaaaaacttgtacatttaaagtataatctgaatgagcgggatcatctgcatcacaatgatacatcttcacttcccgatcatgaataaaatcttcaaaaataagattttttccatattttttcttcatttcttaatccccttttatatagtcctattatctattataagcaaaaaactagcttttaaaagctagtttttgtttttattagaaaatattcggtttagggcaaataattaccagcagctaagtataaatcgtaccactcttgtctagtcaatcgaatcttggcacctttagcagaatccctaatgtgttgcggattcattgatccaactagcatttgaatatttgcaggatgacgtaaaatccaagctgcagcgatcgcatttttacctacctcatacttatcggccagtttttgcaactcttgattcaacttggggaagccatcattatcaatgaaagtcccttcaaacatgccatactggaatggtgaccaagcctgcacagtaactttgtgtagacgggcataatcaagaaattggctatcacgatcaactgatggtttatctaccatattcatatgcatcccaaagtcaatcattcctgtatgtttcaggctaaattgtaattgattgaacatcaagcgctggctcaagcaactttgtaacaatttaaattgagccgtatcaaaattagatacgccgaaaaagcgcaccttacctgctgcctgtagttgatcaaaagcctcagctacttcttctggatccatcaatgcatctggtcggtgaagtactaatgaatcaagataatctagttgcattctttccaaaatttcatcaacactatgcaaaatatgttctttagaaaaatcataacgttttcctggaacaattcctgttttagattgaataaacatctcttcacgcttgatctgcatttggctaaaagcttgaccaaaaatctcttctgattttccaccgccataaatatcagcagaatcaatgaagttgatcccagcatcataggcggcttgaattgccacttgagcctctggaactgatttttgattcattcgcataatgccaagtgccatcgctggaatgcttaaagtagtacatcccattttaattcgtttcataatgtaagtcctttcattctttatttacctcacatcatgaaccaaaaatagctaagtttcaaccacaagaaattcaataatcttttattaatatatcttagctactgccgattgaattgattctttatctaagaattcgtcataacttgtatcttggcgactaacaatacctttaggtccaacttcgataatgtggttagcaatagtttgaataaattcatgatcatgtgacgtgaataaaattgaacctggatatgaaacaagggcatcatttaatgcagtgattgactcaagatctaaatgattagtaggatcatccatgatcaatacattagccggttcaagcatcatacgtgacaattgacaacgaaccttttccccaccagaaagtactttgatcttcttctcaatttcttctccactaaagagcattcgacccaagaacccacgcaagaaagtattatcatcttgttccttagtcgcatattgccgtagccaatctaagattgtaagttcatcattattaaagttagcgttcaaatcgcgtgacatgtagttaaaggccgttgtttgaccccatgtaacggtaccagtatctggcttaagtttaccagcaacgatatcaagcagcgcagtcgttgctaaagcgttacgcgataaaaatgctaccttatcaccaggacgcacgatgaaagacacattatccagaatcttttcaccgtcaaccgaataagaaacgttctccaccttaactagatcattccctaagtcacggtgcatttcaaactttacaaatggatatttacgactcgatggtttaatatcgtccaaggtaattttatcaagttgtttctttcgagaagttgcctgacgtgatttagatgcattggcagaaaagcgggcaataaattcttgtaattgcttcatcttttcttcttttttagcattttggttagcagctaattcattagctagcttgcttgattcataccaaaagtcatagttacccacataaagctgaatcttaccacgatcaacgtcacacatttcagtacatacttgatttaaaaagtgtcggtcgtgggaaacaacaatcacaatgttagggtaatcagccaaaaagtcttctaaccattcaacggtatgaacatccaaaccgttagtcggttcgtccaatagcaaaatatcaggattaccaaacaaagcttgggccaataagaccttaactttttcgctttcaggtaaatccttcatcatcatttgatgttcttcttcaggaatccctaatgattgcagcagcttagccgcatccgcttccgcattccaaccatcaagttctgcgaacttgctctctaattcagctgccttaaccccatcttcatcaccaaagtcaggtttggcataaagagcatctttttctttcattacttgatacagttccttgtgcccttgaattactgtgtccatgacagtgaagtcttcgaaagcaaagtggtcctggttcaagctggacatgcgctcattgggatcaattgaaattgaacctgttgttggttccagtttcccctctaacaatttaagaaaagttgacttaccggcaccattggcaccaattacgccgtagcagttgcctggagtaaattttaagttaacgtcttcatagagtgtgcggccaccaaatcgtaaactaacgtcggatactgtaatcaatctctttacctcgcttaaaatataaaattatgtttaagtatatcaaaaaagatggtcccttataatagagaatccatctttttaagcaatttattaaaactttttgaagctatctagcttttcctgggtaatatcacgaataattgcagtagctaaatcaactgaagccttaaagtccttataactactgaaacaatatggtgaatgttcatagcgcaccggaataccgatgacaattgttggcgcaccattttcgtagtaaattgcagcaccatcctgaccgccaccggttctaaccgaacgagtatatggaatattatttttatcagctaaatcacatgcatattgttggaacttaggatttggtaaaaatgtcgtatccatatcgcgcaacattgggccacgttttagaccagtttgagaaagccagtcaggcgtaaaagtatcatcagctggacagctttcgagtaccagacaaagatctggcttaacttttctagccgttacataggcgccacgcaagccaacttcttcttgactagaaagtgcagccactacgtcaaagttagtttcttcacccttcaaattatcaagcacatcaaccatcgcaccagcaccaaaacgatcatcaaagtctttaccgaagaataaaccggacttttcatgatattcgcatttaacatcaacaaagatagggcaacctgtatcaatcttgtagtccttgattgtctcctcacggctagaagaaccaacatcaattgacatatctgccacatcaggtacactattgcgctcagctgctgtcatgaagtgaggcggcttagttgctacaacgccagggatatattctccatcacgattgcgcactttaacgcgcaaggctggaatattatattttacccaaccaccaagtggaacaaacttaattaaaccattagggcgaacagcttgcgtaatgaagcctacagcatctgagtgcgcatcaagttgaattaccggtcgatttcccttattttctttcttggcggccccggatttaaaattgaagtgcaacactaagtgttaaacaaaaaggccatgaagacctaaacttgaagtgacgaaaaatcaagaaaggaagatcttcatgaccaattcaaattctagcatttctaagcactatcatcaattaaccagcgtacaacgtggacaaattcaagcaatgctggattccggcataacttcccgtactgttatcgctcaagaagttggctgccataagtcgacaatcagtcgcgaaatcaaacgcggaagcgtcctgcaaagagacagcagctatttattgtatgagcactattacgctgatactgcacagatttattatgagaagcgtcgcaaaaactgctatcagcgcaatccattgaagcattatgctgtctttttgagaatgctctccagacgctttaaagctaaatttgatgccaccagcatcgatgagttcgttggtgaattcaaaaggactatgccaggctacccttgtcccagcacaccaaccgtctatcgctatattgatcagggcttgctggacataagcaatattgatctgcctatgaagctcaaaagacgcaggaacaagcgtcatcacagccatggcggtcacgctttgcacaagaagcatcttggcaattccattgaacagcgtcctaaagagattgaagacagaaaagctccgctgcactgggaaggagatctggttaaaggcgtcagacgcaagaatcagcctgctttaatgactttgactgaaagaaccacacgctttgaagtagttatcaagattcctgactatcgggcaagcacatgccaaaggctgcttcaaaaggagattgacagacatcctgcctggtttaaatcaatcacgtttgacaatggctctgagtttgcggatatgaccaagatcaagggctgccagatttactttgctcacccatattctccatgggaaaggggcaccaatgagaactgcaatggtcttttgcgtcaattcttccctaagagcaagagcatgaaagacaagtcaaaagcttatgttcaacaggcaactgatgccattaaccacaaatatcgccgaatcctccaatatcacacagcagaggaactcttcaagcaatatatctcttcataacctaactgttgcacttaatttgacaattcaggaattatttattttaagaatgttacaaggtatttttgcaggctttgtttctaattccaatgctctagttgcgactgaaactccgaaggaaaaatctggacaagcacttggcactatggcgtctagctttactgctggcaacttactcgggccatttattggtggagccttagcgtctattttctcctatcgcgttaccttctttattacaggtggtctattattaattgcatttcttttgtcattgttctttgtccatgaaacagacttcaagccagtaactgaaaagaaacttgataaagcaagcggagtaattaaagaattacgctcaccgcaattaatctttggcttgcttttaactactctaattattcaagctgcaaataattcgattaacccgatcgtttcactctatgttaaacaattgatggctaaccacggtaatgtcgtctttatttccggggtaatagctgctttgccaggaattgctacattccttgcggcatcgcgcttcggtgcactcggtgaccgaattggaactcataaaattattattgctggctttattggagccacaatcctcttctttttgactgcttttgtacaaaatactgttgaacttggtattttacgctttttagtcggctttactgatgcttgcttgttccctcaagtgcagactttgcttactaaaaatacgccagcaaaaatcacgggccgaattttctcttggaaccagtctgctatgtacatcggtaatattttcgggcctctgctgggttcaactatctcaggattaactaattacagcactgtctttatcgttactgctgggattgttgtcttcaatttgattttgtttagatttaatgtgattaaaaatttgcagtaaaaagtgtctgggaaaaaactaagtctcagatcatgaaaaaagaacgttgaatttttgtttcaacgctctttttgtatacttttagctccagccttgatattattaaatcatcacaaaataaaaaaggtggaaactaacatgtacaagaattatatcacaggtcaaactgctttaacacttaatctagattttgccattccggccaatcatttggctaatgtcatcagctggtttgtagattcaattccagaagatgttttagtaggcaagactgctaaaacgggccgcccagcctatcatccagccatgatgctcaaaatactgctttttgcttactccagaagagttttttctggcagaaagattgagttgatgctggaagaaaatctgccaatgatgatcttggctgaccagcaaaagatttcatatcatactatcaataattttagatcaagcagccatgccaatgaactgattaaaaagagctttatctacttcactaacctgttagaagatgaaggcttaatcaatgaaggtgctgcttttatcgatggtactaagattgaagctgatgctaaccgctatacatttgtctggcgcaaagcggttgaaaagtatcatgaaaagctgaaaggccaggcagttgaactttatgatgaattgattactaaagaagtagtcaaagaaatggaaaaagaaaaagttcaaactagtcaggggctaaaggaattagctcaagaaactgaagcagaaattaacaagctgactaaagagattgagcaggaaaacaaagccattcctggcggttcacctcgaaaagccaagcgacgtggactaaaaaagattctgcaccggctaagaaaagattatgtgccaagaatgcaaaaatatgaagaagccgaagagatctttgccggacgcaacagttattccaaaacagatcatgacgccacctttatgcatatgaaggaagaccacatgaaaaatggtcaattaaagcctggctacaatattcaagcagtcacgaccgatcaatatgtagttgattatgccatctttcctaatccgacagatttcaaaactttggagccggttttggatcaaatgaccgtgttggacaagtttgacaaaatcgtcgccgatgctggctatggcagtgaatacaattattcgatgctggaggaaaaatatccagacaagaagtactttattccctacactatgtatgaaaaagaacagaccaaaaagtataagaatgatccaactaagctaatcaactggtactacaatgaaaaagatgattattacattgatcatcatggcgtcagattcaatttcaaatattacagccagcgcaaggatcgttctactggtcaggtccgtgattttaaggtttatgaggcagacgagttccagctaacgccagaattggaacaattggctaaaacagctagcggccgccagcgccaagttcgctataatcctaactggcaatatttaaaagaaaaagcaaaagaagttctccaaagcgaagaaggcagacacatctatggcatgagaaaatatgatgtagagccagttttcggacatttgaagaacgtatttggcatgcgcagaacgcacctgcgaggtaaagagaaggtcgaaaccgatatcggaattgcctttatgatgatgaatttgaacaaatattgtcaaagaaggtggctgaagggccgatttttattgttaaaaattttaaagagaacaaaaaaacgatcaagattcttaaaaaaggaaatcttgatcgtttttattcatctggaagctagttttttcccagacacttttctattccgcagctttctttgcttcatgatgattataaataaagtttgcaacatacccacaaataattagcaacaacgatacaatcataatttctctaattccggtatgaaaaattgtccgcattgttggcattaacgccttaggcaaactcttcgcagattctgcgtcactcaacttattcatcatggtcatcgtaatattgtggtgtccagcaattccacgtgctagagctaaattcataatcaccccataaacggcagccataatagtttgcgctaaaattctaatcaaaaaactaagcgatgtagcaggtgccatatccttttcaccagcgtcaatctgcacttttatttgaagaataacgaagattgagcctacacctaaaccagataacgctgcaatcgacatcaaaatctgatatggcgtactaattggtacaataattaaaccgattactgttattgcaatcaatgtaaaatcgaaaattaacaaatgataattattaaaatgtctgagtaaatgcggcgtactttgtgaaccagcaatatcaaagattgagttaggaatcaacgtcatcccaccgattaaggccgttgtccctaagattgcctgcgaccacatcggcaaataagtgttaactgcaatatatgcaccccaggcaaaggcaaaaagaatgaagtcaccaactaaagctttattagtaaaaaccgataatggcacgataggactagcagcttttttctcaactaagatgaaccagacaagcattacgatcccgataatcacgaaaatagccactagaaaattactagctagtcctaacatctgaattccaatcaaaaagcaagtcaaaccgccaattagggtaaaagcacctagtcggtcaaagacagtattgatgtttggcttacgaatgccacgataaaaaagaaaactcaagataattgataccaatcctaatggaacattgatataaaagacccagtgccaggacaaagcatcaacaatccagccaccaactagtggaccagcaatacaagcggccgaaaaactagctgcaatataactcaagatgacagttctacgtttaatattcggataaatataaccaacaatcacataaggaagagaacccattccaccagcaccgacacccatcagtactcgagaaacaaggaaaaagtaaatatcgggagccactccttctaaaactgaacctaaaataaataaggctagtgacagttcgaaggcaaatttgttacccattctttcaccaattttactccaaattggcactgagaccgacattcccagtaaaaaacaggcaacaatccaccccatatactgaattccgtgtagatcggacacaattgctggaatcgccgtattaataattgtcgcatctagccctgacataatattagccagcaacaaagacaaagtaaccattgatatttgcttcttagtcatttaatcccacctttttaactctaaaaactactattactcatagtatgcaagatttaactagcaaaataaagcacaatatttttccactaaatcttgacaatctgtgtttttccgagttaaatataaagaaaataatagtgatgacctttaaagttagtcccgtgaggctaagaaggaaatctgcacaagctaatactttttgtcgttagctaatacagaaggaccatcttgagccatgcgctcttggtggtctttttcttttggtcatccagaaaggaaaagctatggcaaaagaaataatcgatgctttaagcatgaaacgcgccttgatgcgaatgacctacgaaattgtcgaacgcaataaaggtactaaagatcttgtattagtcggaattaaaactcgcggttggtacttggctgagcgaatcgccaaaaatttgaaaaacttggaagatgttgaagtccctgtaggggcaattgatatttcacaatatcgcgatgatttaccagaggctgagaaggaaaagatgatccacagccaacaacttgacttcgatatcaccgataaaaacgttatcttagttgacgacgttcttttcacaggtcggacaattagagctgcccttgatgcgttaatggatcaaggccggcctgcaaaaattaatttggctgttctagtagatcgtggtcaccgcgaattaccagttcgtcctgattttatcggtaaaaatattcctaccgcaatgaatgaaaaagtccaagtctcaatgaccgaagtcgatgagaaagacagtattgaaatcgttaaataggagttttaaatgaataaaaaagaaaagtacagaaaccctgaggctatcttagacgtttatgaaaagcctgaatttggccaaggcgtactgctatccttacagcatatgtttgctatgtttggttctaccgttttagtgccaattttaattggaattaacccaagcatcgctctactttcatcaggaatcggtaccttggtccacatgctcttgacccacttcaaaatcccagcatacctcggatcaagttttgccttcgttgctacaatgcaagccttaatgaaggctgatggctacccggcagttgcccagggtgcgatcgcttctggtttagtttacgtagttgttgcgatcatcattagcaaaattggttcaggctgggttaacaaagttttaccaccaatcgtagttggaccaatcatcatcgttattggtttgtcattagcaactactgccgctaatgacgctatgatgaataattctaagtatgatttgacttacttcggtgtagctatcttcactttggtcatgaccttagttttccaaatgtgcttcaaaggcttcaccagtttggtttcaattatgctaggaattatctgtggctatatcttatcctgctgcctcggaattgttgatttctctggcgtggaaaaagcagcttggttcacattgccagcacttgatgtgcctggaatcagttaccacttcaaatggtatcctgccgctattttagccatggcaccaattgctttcgttacaatgacggagcacatgggccacattatggtattgaattcattaactaagcgtgacttcttcaagaatcctggcttacacagaacgatgatgggtgacggtctttcaacgattatcgccggtttcattggtggtcctcctaccacttcatacggtgaaaacatcggtgtgttagctatgactaaagtttactcagtttgggtattagctggtgccgctgtttcggccattatcttcagttttgtcggtaagcttgccgcattgatcgaatcaattccaatgccagttatcggtgggatctccttcttactctttggtacgatcgcatctaacggtttgaagatcttagttgatgatcaaattgactttggtgaaaagcgtaatatgttaattgcttcagtcattttggttatcggtatcggtggtgcttacctacaactgggcaatttccaacttacctcagttgccctttccaccattatcggaatgcttttaaactggattttgcctaagaaagcagctagtgaaaaggctcaagaagaaaagattaagaaagaaaaacaagaaggtaaaatttaccaatagatagaataagccatttaaaacccgttagttatcgcaatgatagctaacgggtttattttttactctcactttgcgcacacaatgttgtaagttgtgcgaaagttggcaaaagttagtgtaagttaattgtaaaagcttaagaagctaacaaagccctatatatcaaggcttcgagctactttagtaaaaactttgctctcactttgcgcacgcaatgttgtaagttacgcgaaagttggcgaaagttagtgtaagttgcgagagcaatagtatataatttattgacacaaataaatttaagtcatgaggtgacattaaatggactttttaaacttcaaagcaattacacaaactggtaattttaaaacaccatctgaaaatgaaaacatcgaatacaaagaagctagttggaaattacctaaatcattttgggaaactgttagctcttttgctaatacttcaggtggaataatgagactgtaaaatagtttgtgtaaggatgaatgattccttaaatttatttctttaaacattagaaaaaggagttcctttctcgtatgattggtttgaacaaaaaaacacatacagaaagaagaactccttcatgaatgattttaccaaagattttgctcaagctctattcaatccagacaaaataaatgatttattgcgcaaagagctacaacaggctgttaataacttgttagaagctgaattgactgcctttctgggctatgatccctatgccagaaatggctggaatactggcaactctagaaatggtgcttatttccgcaaagttcatacgcaatttggcccaattgaagtgcaagtgcctcgggatcgcaacggtcaatttcatcagcacacgctgcctgactacaagcagcactcggatatcttggaaagcatgattatcaagctttactccaagggcgtgaccaccagggaaatagccgatctaattgaaaagatgtatggcagccattacagtccagctcaggtatcaaatatttccaagcagatgattccaaaggttgaggcttaccacaaacgcaagctaagcgacaagtttttctgcgtctatttggatgcgacataccttcctttgcgccgagaaacatttgagcgcgaagcagtctatattgccattggcatcaagcctaatgggcacaaggaggtcattgactactgcattgcgcctagcgagaacattgaagtctggacagatatgcttcaaaacatgaaatcccgaggcttaaagcaagttgagctttttctttctgatggtgttgttggcatgaaaacagccttggccaggacttatcctaaagctcattttcaacgctgtttggttcatgtcatgcgcaatatctgcgctaaagtacgcgtcgacgatcgtgaaaagatcatgaacgaattcaaacaggtgcatcaacagacaaacaaagaagaagccacagctgtcctgcatgacttctataccaaatggggcaaggtttacagccatgttatcagaagcttgaaagacatagaaccagatctgctggtcttttataactatcccaagcagatcagagcttcaatttattcgactaacatgattgaatcatttaacaatgtgatcaagcgcaaagctaagcctaaggcagagtttccaactgaacagtcgcttgatgcttttattggtattcaggcaatgagctacaatgaccgttatttcaatcgaattcataaaggctttggtcaggttcaggacaccttagaatcctactttgattaaataaataattaaaaaatcaatttacgagaaagaactatttacacaaaagatttgacagtttcggaataatagtattaggcatagcagaagataagaataaacatgaatttagtataactggtgtagacaatgttgaagacattgaaacacaaattttcaatgataataacaatatttcatgccttaatcgacctgtaatccaaaataatgatgttcagatttctttttttcaaaataaaactattattcaagtaataattcatccagaaccctttaatactcgtccaataactgcattcggtaaagcatatattagaactggtgacagagatcgagtagctactaaagagcaacttaaatattttacagttgaaagtcaaagcgagattgatactcacttactaccttcgacctatacaatagaagatctagatgcagaaagtatcaaagaatatcgcaaaataattgaagaaaaaggtattattaatactaattctcaacttagtgatcaagaattcttatattcaattggtgttttcagaaaagatcgattaagtaattcaaatgaatatcatcttacagatcaatgtcattaagttaagacattgacaaattgaatctaatctctgtagaaccgaatcattatgatttggttctttttttgcataaaataaaggcgaaaagaacctaccttttcgccctctgattaaattattaaaccttcaaaattattgccagaaagctggtgttaattatgaaagcccttcacagaaatattttagatcgtcttgatcaaattatcaatgatactggaaagcatattcatgattttatcgatgatcctcatgccttcactaggaagcggtttttagatgcagctacagtcattaaaactactattaatatgcaaggaaaagatttgaccagtgagttgtttagagcttttggccaaaaagctattaaaaataacgataaagtagtcagtacttccgcttatgtccaacgcaaaggtcagctttcacccgcatgttttaagcatattctaactgtatttaatcagaatttatttaatatccagttatttgatcataaatatcgtatatttgccattgatgggtctgattttaatcaaatctggaatcctaaatcagagaatatcgttggaaatctcaatcataaaggaaagccatattgccaaattcatgttaatgcactctatgacctgttaaataatacttatcaagactgcatctttcagcctaagtcaaagatggatgaacgtaaagccgccgttcaaatgcttaaaaagctaaattgcggaccatatatagttactatggatcgaggttataccggctttaacatgattgaaaattgtaatcgcctgcctaactgttattatgtcatacgtactaaaacgggatatggcgcatttaaggaagtagctgagttgcctaatcaagagtgtgataaggatatagcttgctgggtgactacctctaattattattatgaaacccataaggctacagaaaacgttcatttggttaaccatcattaccgtcaatatataaaatatcggtctaaaaataccaaagatggcagctgggactttggagagttatgtacaataaaatttcgtgcctgtaaatttagaattaatgatcctaaatcaggcaaagaagaatgggaagttgttctaactaatctaaatagagccgattatcccttaaaaaggatcaaagaaatctaccatttgcgctggggcattgaaacttcattcaaaaagttgaaatatgctttaggtagcgtacagtttcattccaagcaggatagatttattgaaatggagatctatgcccacatgattatgtttaacgcagtcagtcaaattgatgctcaagcatatgtaccacaaaaaaaatgcaagtatcaatatgcgatcaatttcaaacagtcatgttttgtcatccaggctatgtatataatttcttcttcaactgaaatctttaaaaagattcttattcaaattagtcattacacaattccgatcagaccaggacgaaaagacaaaagaaatctcaaacccaaatcagctgtatattatttatatcgtgtagcctaatttctaaacaagatttgggtttatttggcatgaaaaaagagcattcaaatgcgataaatcgcaaatgaatgatcttaaaagtccaagtcgataatttgtcaatgtcttaacttaatgacattgtcttacagatggtggtctccttttctttggaaaatatatttcgataacagatcgtttcccacgttttcaattagactatcaacaatataatagcgataattctaccaactggaatgatagagtttctgcaggtgacatgaattatcccactttaaatatcttttctttttataatttagttttagctaaaatagaaacaaatatacgcatggtgctagttaaatcgttttagttaataaaaaagtccaatcttgttagactcgacttgtaaatagtaataatagaaaagagtctgatctgattgaactgtcttaagcttaagcgttttagccaccatttacaagttagttttaaagatttagtgataatttgtcggcactggtatcgtttgtatgcaccggctgagtttactcatcggcgaaatattgatcaaattaaaactacggacagtctgattttggctttacttatctggcaagctaagacaggaattgaatcacaaagaagattctgtgaatgtttcaattgtttatcacactcacgttttaatcggcgttcacgtcagctattgcaattgatttatcagatacggcaagaaatgaataaaaaggttgacctgaatggacatttcttgatcattgacagctttccggtacctgtttgccaaccaattcgcaactatcgtgctaaaatttttcgcggttatgccaacattggttataaggccaccaagaaaatttacttctatggtttcaaagttcatgccattgttagcgatgacggttacattcttgattatgtcgtaacaaaagcatcagttcatgatgccaaggagacagttgaactgctggaaaatgcccatccatctaattactatcttcttggcgacgaaggctatttaggcaaagaactgcatcaacagctaaaacaaatgggttatgaactttggacaccatatcgtaaaaatatgacaggagctaaaaagcacaatgatcatcaattgatggctattcgcagaacaattgaaagcgacttttcgcttctgacctattacaatgccgagaacaatcgagcacgtagtctgataggctttcaaagccggttggaaattgcaattttagcttataatttggcttattgtctagaaagatttaactagcaccacgcgtacaaatatacctgatccatttattcaaggtaatgaccttagtagaacgtcctatcacaacgatctaatcatcgcagctaaggaagccctagtcaattgtttaatgcattcatattatgatggtatggtaggtgtaaaaattgtagatagacctagttactttgaatttacaaaccctggtactatgcgcgtaagtaaagaatcgtttttacgtggacaatattcctccattagaaatactgaaatcgctagtttattcagacgaattggtgtctctgaaactgcagctagcggtggtccaagaattcttaatactgtgttgcaaaataatttaaatgatcctgaaattaacattgattatgaaatcaatactactcgcattcgtatttttaagacttttgcaattgataatcaggaaaaattaactgaaccagagaaatttattatgtcttttgctagcagaaatcctaatttttcaataaatgatattgttaaagatccgcagaatcattttggtaaacaaaccacgattagaaaatatgtaacttaaacttcccacacgcaaaattgcttgtttcattgtgattctgcgtgttttgacaaatataaaaggcacaagtccttttcattgctataattatattgaccaaaacataatttatttgcatgaaaggcttgtgccaatgtctattttaccatctcctgaccaacaaaatgaacaactattttcaaactcaatcatcagcttcatcaagaagtttcaggtgatcaagctgttgagaaaatgtggcttccgcaaggaaaaaggcattagcctgttcagcttgtttctttacgttttaagcaatgtctttcgtgaccgcagcttatatatgcagctgaaaatggatcattttcaagaaaatttttccaagaactcatattaccgttttatgcgcaacgttcacgtcaattggctccacttcaccacacttctgtctgcgcaaatcattaataaccacttgcgatctttgacttcagaaaaacgggctgattgctttgttgtcgatgattcctacttctctaggaccggcttcaagaaaacagaattagtcgccaaagtttttgaccatgtatcaatgacttacaagaaaggttttcgcatgatgaccctgggctggactgatggagcttctttcatgccaatcaattcagtgctgctgtcttctcagaagctacagaatatgattggcgaaaataaagtttttgatcagcgcaccattgctggccaaagacgtatgcttgcccggactaaaggcacagacgtgatggttaatttaatcgaccaagctatgaaagcaggtcatcaagccaagtacgtgctgtttgacagctggttctcaaatccacatcaaatcgtccagctcaagcaaaggaagctggatgtgattgccatggttaaggttagctccaaaatcaaatatgaatttgagggagaacgcaaaaacatcaaacagatttatcgcagctgtaaaaagcgatgcggccgttctcgctacctgctgtcaatcccagtcaaagtcggacgccaggacaaagacggtgctaaaatagatgcacggattgtctgcgttagaaaccgtgccaatcgcaaggattggctggcaatcatttgtaccgacatgtcgcttagcgaagatgaaattatccgcaactacggcaagcgttgggatattgaggtttttttcaaaacttgcaaaagttatctaaaactaagtacggaatatcatggcctgtcttacgatgctttgaccgctcatgttgccatagtttttactcgctacatgcttatgtcagttgccaagcgggacgatgaagatgaacgcacgctaggcgagctgttctattgcatgattgatgagctggcggacattacttttagccattccttgcaattgattactgatgcaatgctggccagcgtaaagcaagtctttcatgccagtgaagcacaaatagctgaattcacggctgactttatcaatcgtttacccaaatacatgcaaaaattgttaaagaaaactagcaaaaataatatagaagcctaaagccaagcaagatcaagagattactggcttatttagtgtgggaagtttaagtatgtaaattcattagtagagaagcatttactatccaatgagaaaattggcaaaaaatatatctacaatttacagaaaaacaatgattatctaaatcgcgttaagcaccttaaacatcttgaagataatttactcaaatagatcattcaaaaagctcaacctacaaaattcatgcagattgagctttttcatcttatttatcttcaaatattctaggcttatcgtcatcaagtgaaacatgcggaatttcggtgttatttgtctcaacttgatccttctcagacaattctgccttcattaactcacttttggctttactagaagtattgcctaaaagtaaagttttctcctgcggcgtattcaccattgcctgtttttctttgaattttttataaacaatcgccgctactgcaccaatagctccagcaacaccgataattgtgccgattaatctcatctttttcatagggatcacctcgtattttgaaatcactttcttattcttaattatatctaattatgaggttgaacacatttttaatgcctattacctaaaactttccgcaatttccggatccatctcatcttctaaaacactgtagccttgatccaaagtcttgatcaatgccatatcctcatcatctagttcaaagtcaaacacatcaaagttttctgctaatctagccttatgaactgacttaggaattactacataatttctttgcaaaaaccatctcagcatcacttgagcagtagtcttatgatgcttttctgcaatcttttgcaagacaggattagtgaaaatgtggttggctccttctgcaaatggtgcccaggcttcaggttgcacgccctctttttccatatattgctgtgatttccattcttgattccagacattagtctcaatctggttcacagccggctttacatcattaaaagtaatcaaatcagctaagcgttcattccaaaaactacttacaccaattgcccgaatgcgtccctctttatataaacgttctaatgctcgccaagtgccatagtaatcgttatatggcttatgaatcagatacaagtcgatataatctaactgcaactttttcattgaatcatcaaaagcttgcaaggtatgatcatagccatacttatcgacccagatcttggaagtgacgaaaatatcctcccgtggaatgctgctatgcacaagtgcatccccaactgcctgttcattgccataaatttgcgcagtatccacaagtcgataacctacttccaagccgttttctacaacttgttgagtttgagctaaatcatcaatttgataaacgccaaagcccaagcgtggcattttgacaccattatttaaaattacatagtctttcatatttcttctcgttttctagttaattattgctatttaattttattttaacatagcccatgaaattcgactttatttcgtgaaacatagatattatttcttaaaattaagcactcaagaaaagcctaaccagcatccctcaacggaattgccagttaggcttcttttatttttcaacttttgcttgataaaatccaaagctcatctgcttcaacattctagtaaaactatcaatgtctagctttttaccggtagtcaaagcttcaaattcaccatcaggatcaaccaatttgcggtcagtcctgtgaaatccatttctttcatagaatttcaggcgactaacacgctgcttataatttttcgccttcttggtaactggctcaatatcaatgacaatttgcttatcagggaatcgatcctctaacatcatcaagatcttggaaccataaccttgtcctcgcaatttttcattaatggctaaataggtcaaatagactgtattatcattctcagcataataagtaatgccgcaaaactgaccatcattataaattgcgtgaaacttaacatttcggtgtaatgacattgctaaaagagaaaacatggagaatctttcccaagctggaaaagccttcatatataacttcttagcgtcacgatatgcttttgtgccccatcgggcgggtttagagtctaaaatagtatccttcttttctaattaaaaattgattgttaataactctgaataatattattatacaaaactttttagctttttggaaactgtcaaatcttttgtgtaaatagttctttctcgcaaattgattttttaattatttattcaaaataagattctaaggtatcctgaacctgaccaaagcctttatgaattcggttgaaatagcggtcattgtagctcattgcctggatgccaataaatgcatcaagcgactgttcagttggaaattctgccttaggcttagctttacgcttgatgacgttgttaaaggattcaatcatattggttgaataaattgaagctctgatttgtttgggataattgtagaagaccagcagatcgggctcaatttccttcaaacctttgatgacattgctataagctttattccatctggcatagaatttgtgcaagacagctgcagcttctttttggcttgtctgttgatgtatctgcttgaattcgttcatgatcttttcgcggtcatccacccggactttagcacagatattgcgcatgacatgaaccaggcagcgttgaaaatgagctttaggataagtcctggccaaggctgttttcatgccaacaacaccatcagaaagaaagagttcaacttgcttcaagcctctggacttcatgttttgaagcatctctgtccagacttcaatgttctcactaggagcaatgcagtagtcaatgacttccttatgtccattaggtttaatgccaatggcaatatatactgcttcacgctcaaacgtttctcggcgcaaaggaaggtatgtcgcatccaaatagacacagaaaaacttgtcgcttagcttgcgcttgtgataagcctcaaccttggggagcatctgcttggaaatatttgatacttgagctggactataatgactgccatacattttctcaatcaagtcagcgatttctctggtagttacgcctttggagtagagcttgataatcgtgctttccaaaacatcagagtgctgcttgtagtcaggcagcgtgtgctgatgaaactgaccgttgcggtctcgaggcacttgcacttcaattggtccaaactgggtatcaaccttgcggaaataagcaccatttctagaattgccagtattccagccatttctggcatagggatcatagcctagaaaggcagtcaactcagcttctagcaagttattaacagcctgttgtagctctttgcgcaataaatcatttattttgtctggattgaatagagcttgagcaaaatctttggtaaaatcattcatgaaggagttcttctttctgtatgtgtttttttgttcaaaccaatcatacaagaaaggaactcctttttctaatgtttaaagaaataaatttaaggaatcattcatccttacacaaactattttacagtctcgctttttgacataatacttatcttccattcaaaatttaagtatgcattaatattatttattttagtaaccagtcaatgacattaacttggctaattccattatcatcataacttcccggatcttcggtaagtaatatcttagggtagttatccttaatctctaaaaaaggtgctatttctctttgataagttttttcattctgaaccgttaaactaacttgatagtattcccgaataccatcgcgaatagcaacaaagtctacttccttttttcctaaatttcccacatacacttcatagccacgtctgattaattcaagatagattatgccctctaatctgttccccatattaggacgcttttgccccaacaacgctcttcttaatgaaggatctaccatataatacttattgttaatttgtaaatactttttaccagcaatatcataacgatcacagcgataaaataaatatgaatctaccaatttttctatatacgccatcactgttgcgcttgtcgctttaacgccattattcgatagcacattcgctaccttagttggagtaattaaattgccattagtatcggtcaaaaaagctgcaatatgttccaacaaggtagtatttcctcgttgcattctagctaagatatccttaaccaagacagtgttaataattccttgaatataagacagataggtattttcatcctctaattcagtagcaaaagggaatcctcctcgctctaaataacgattaaaagcttcttgatgggataactcaggaactgaggctaaaaattctttaaaagaaaagggatatacagggatttcaatatacctaccagccaataaggttgctaattcacctgaaagcataaaagcattcgatccagtgacataaagatcaacattttgcttgataaaaaggctatcaatagctttttcgaaatgagggatgtcttgaatttcatctaagaaaatataattcattttatctggaatcaatcgttgatcaatatattgatacaattttaaataatcagtaattgtagcaagccctaaatcttcaaaatttaaaacttgaatttgttcctgcttaacacctgctttaagtaattgttcctgatatagttttaaaatcgtggacttaccagaccgacgtactcctgttaaaactttaattatttgtttatcacgtagtttattcaatttatcaatgtatttaggccgcggaagcatttttaatcctttcaagttaatgtaattcaaattagtttaattttcacgtcaattttagcatataattcaaattagtttcaatctcttaaaacttctgagatgagttttaatttaatttgaatttactcaaaggcttaccactaaatttaaataaaaagaaagtctgtcaatctaacaaactttcttttttcataaataatcgttaactacatcaacttatatttcttcatcaattcttcgatataagtgcccttaaccttcttaagcatccctttaatcgcaaacttttcaggcattggcaaatcaagatcagccaacttcttctggtcattcaggtaatacatcgcattcatcaacattctgacatcaaatgcggaagcgaagacttctggtacaccgcggtcaatattaagcaaagtgtagacagcttccattgccgtccgaactgaatactctgtcgtaaagacagtgtctcttggagtttcggcaaagttaccaataaaggctaagttcttagaatgatctggaacaacctttgggcggtcgcctaaagctcttggcataaagtaagaagtaatatatggcatgtgaaccggaattgttgtagctgcggcagctatttcaggaattctttcttccggcacacccatgtgatagagccactcttcacacatttcaagcccattacaatcaggcatcgtcttttccacataattacccttggtatcagagaataaaccatataaccaaacaattaattcatttggtttttgcgccttaaagtgtggctgacggctgattgagtaacctaatagccaattagaatccttaatagtagttggtccactagttacgattgagccactgtgtggatcctttttattaacagcttcaataaatggcacaacatcatcattcttaaaggtaatagttgaagacatccgccagttagcctttggaatatccttgcaaaagacatcaggatggccaaagtcttcatcttgagctgctaagttcttccacaatcgccagcttgcacccaattcatgttctgctggagcgtgatgcagttgatctccataggtagtactctcagtaattgaaccattagtaacgaagactaagtcatttggtgttaagtcaatggtcttcttttcgccatcttcggttaaaataatttgtttagcaaccttttcgccgtcagagcggttaacaaagatattatcaaccaccgtattatagtggaagattacaccacgatcctttaaatacttgaccagcggcaaaatcaatgattcatattggttatacttggtaaaacgcaatgatgaaagattcttcaaggttgctacatgctgtacaaagcgcatcaagtagcggcgcatctccatcgcacttgcccatggttcaaaagcaaacattgttgaccaatataaccagaagttagattcaaagaattccttagtgaagacttcattaatcttcttattttgcaagtctttttcgggagttaaacaaagatcaacaatttccttcactgcctttggtgtcaaaagaagttgcccatcagtcggcaaagcttgaccacgatttacaattactctagttttagcataacttggatcttttctatttaaacgatagaaggaatccaaaatagattcaccttcatggtcaggcgaagggattgatctaaataaatcccacaaacattcaaagtgcggctccatttcacgaccgccacgaatgatgtaactttccttttctttattatagatcccatccattgagccaccaggcagacctaattcttcaaaaatgtgaattttcttgcccttcatttggccatcacgaattaaaaagacagcagtagctaatgcagccaagccactaccaacaatataagcagatttttgatcaacatctttaggtttatcagccttaacaaaggcttcataattgccattactataatgcataattgacacttctttcaataatcgttacacttgtaactatttatgcttataaaataatgtaagcggtatcagttgtcaaacattttacatttggggatgatcttgatgaatatgaagagtctgcatacgcagcaacaaattgaacatgcattattcaaattactacaaaaaaagccttatacggagatctctattgcagaaatcacccgtaaggctaaggtatctcgtacttccttttatcgcaattatgaccaaaaagatgaagtcattgcgcaatttttatttaatcaataccataattttatcgctgatattgatcaacataatttgagaacttttaagcagcagcttactgcttaccttgaattcttcaaagataatcctcaactaatgaaattactgcttgatgcaggatttgaaggagaattacttaattttcaaactaaatatttgaaaaagctgatgtcagtttaccattctgatgtccacctacccgactatgcaatagcctatcaatctggtggaatctatatgctgttagtctggtgggttaagcaaaattatcagaccagcttgactgatttaatcacttatgccgaaaaacacattatgctgtaactaaaaaagaagagctcacaaatcgagcttttattttcaaaattattacaatttcttgcattttttaccaaagttaaagtagaaattcattacaaaggcgataattaacaaaatcaatgaaaccaacataatttccttaataccgccgtggaaaatagttctcattgttggcactaagttttgcggcaaactcttggcactttgcgcatcactcaatttattcatcatggtcatcgtgattcccttgtgcgtttgaactccgctggcccagttcagattcataattacgccataaacagcagccattactgtttgagctaaaattctgatcaaatatgaagttgaagtggccgttgccatattctttagtcccgcatcaagttgtacctttaattgcaaagcaacaaagataaagccaaccccaatgccagaaaatgcaccaataaaggtcaacatctgcacaggcgtatgtatgccagaaataaacaaaccagctgatgagataatcatggcaactattccaatcaaaactaatttaaaggttgtcatatgctcctgaatcgctgctacactttgagatgcgataatttcaacaatcgaatttggaattaacgtcatcccaccaattaaagctgacaagcctagtaatgcctgagcccacattggcatataggtgtttactgctaaaaaggcaccccaagtaaaggcaaataataaaaagtcgccatctaaatctttatttttaaataaagaaattggaataattggattgtctgcatgaccttcgcgaataaagaaaaagacgatgaagactaaactaattataatcaatccaattatgatccagctagcggttaaaccaactagttgcacgcccatcaagaataaaagcagtccgattactaataaagtagcaccagggatatcgaaaaccggtgtcttttttggagtaaccggtttgtagtaaattaaacaaatcaaaaatgcaattaagccaattggaatattgatatagaagacccagtgccaagagaaagcatcaattaaccaaccaccaacaagtggccctaagatcgcagccccattccagctggcagttaaatagcctaatactttggttctcgttttaatatttttaaacacataaccagcaatgatataaggtaaagaacccataccacctgcaccgattcccatgataaagcgagagcacagaaagaaaataatatttggcgctatcccttgtagagccgatcccaaaacaaagagtagcaatgaaagctcaaaggctcgtttgttagtgattttctctccgatcttggtccaaatcggaatcgaaatcgacattcctaataagaaaattgccacaatccaacccatgaattgaattccgtgcaaggccgcgacgatggctggaatagcggtattaataatagttccgtctagccccgacatcacgttgccaagcatcaaggctgccgtcaccattgtaatctgttttttattcatgcttaacttctttctatggtatgtaaaaagcgttagacaaaaatttctaacgcttttgagtaaaaaaatatggaggatacagggctcgaacctgtgacctcctgcttgtaaggcagatgctctcccagctgagctaatcctccattatggggcggaatgtgggaatcgaacccacgcatgctggatccacaaaccagtgtgttaaccccttcaccaattccgccatcaacggtccatatgggatttgaacccatgatctcctccgtgacagggaggcgagataaaccactgctccaatggaccaaactagaggaggatgtgggatttgaacccacgcacggcagaaccgcctaacggttttcaaaaccgtccccttaagccacttgggtaatcctccatagccgaacagatactagtataccaaagtgagaagataacgcaagaccttttttaaaaaaaagcaaaaaaataaagcctttcggcttcattaactatgtaaatttttctggaacagcaaatacttatattctttgccagcaatttcaataaaacgttgggtagcaatattacgccagccaaagtgcttaaagaattcttgtgcatctttatcttcagccagacaccacaagtaaatcttgccatagcccatcttcttcagttcattttctgcggcatttagcaaggtcttacctacattgtagccttgaaaatcaggtttaacatataatgccatcaactcaccgcagccaagcattctagtgtcacgtggacgaccatagctaacggctgcttgaacctcgttattatcgtctttaaaaactaaattatgacgaccactctcattgagtcgttttacccaagcagtagccggaatattatccaaaaatacatctggtagcacgcctttatacgtctcttgccaagttgtttggaaaagcttacttgtttgttttgcttcgtcttcactaattaatggtttaataatcatatttacttcttctttgtcaaaacagtcacagcctctacatgtggcgtttgtgggaacatatcaacaggatcgattcgcttaaattcataaccttgttcttggaacaaaagcaagtcgcgaatcattgttgcaggattgcacgaaatataaacgaccttcttaggtccagtcttaactgtcgcattaataaattcaggtgtcaacccttttctcggtggatcaacaaaaaccacatcggtcttcataccctttttagcccaacgcggcattatttcttcagccttgcctaagtaatactttgcgttttcaataccatttagctcggcattgtccttggcatccttgatcgcatcccggacaacttcgattccacgcacggccttcacatgcttagctacactcaaaccaatcgttccaattcccgaatatgcatcaattactacatcatccgaacctaaatctgcttgcttaatcgctaaatcatacaagcgcggtgtttgcagcgaattaatctggaagaaactttgaggtgaaattctaaactttaaatcaccaatttgatcagtaatctggtcattaccgaaaactaggtaatcctttttacccaaaatcacattggtcttcttaggattatagttcaagactaaacctgaaaccttaggaatctggctaatctcagctgcaacacccatcatttgtgggaaatccttaacccggctgaccaaaatgaccattatctcgccattagccttactacgacgcacatcaagatagcgtataattcccgtattgtttacctcgtcataaggcgcaatcttgtacttgcgcaacacatcacgcactgcaaccaatacacgatcaatttccggatcagtggtaaagaaatttgtcaaaggcactaaatcatgtgaatgtcgtctaaaaaagccaatctcaagctgtccattatattctcgcacaggaacttgggccttgttgcgataccctgtttgctcaggactaggcaaagtttgtcctacttcaatctcatctaaatgtgccttcttaagtaagttaacaacttgattacgcttgaattcaagttgcttatcatacttgatatgagctaaagaagcgagtcccgtttgaacccattgattcaacttgatcttaactcgatcaggactttctttttttatttcttcaattttagccaaagcaaagttcttcttaacctttaaaatctttgcactaaccacttcacctggaagtgcattagtaacaaatacggtcattccctcgtaatgggccacacccattgcttcatacgaaagatcggtaatttctaaatctataatttgattctttttcatactcactcaaccttaaaaaaatagctctctattattataatacttgaccaatctttgtgcttcaaaaaataatcgactgctttttagaaccaactatcacccatatacgcatgcaaaatgtggttagccgctactttcaacctcaaataattaatattattagaaaatagcataatcatacgcttggtcttgtaattcgcaacaaagcagcaattataaccagggatactgccattagcgcgaatgatgtcaccattaaaatacactccaccaaaataagctaccgtctgatgctgggcttggtggtaatactcgtttaccattttaggatttttcagcacatcgttatatacaaacttccaataatcaattggtgacatgaataagttccctgctccaaagtccgacgacgtcgtcactgtcacttggtgccagtcaacatttttactcattggctgagggatctcgttttggttaacctcagaaaaatccttaactttctggagcttaagtggcttagcaaaatcggtctgaatataagcattataacttaaattagtttgtttgctaataatagctgctagcaattcataatcaacatcttggtaatcccaagtatgaagatgatcattctccatgtgattaagcatataagctatttgctctttctgatttttaagcggagaagatggtcgagcattgttaaccaagccactagtatgattcatcagctcacgaattgtaatatctttactacctgaaacttgaggataatagttagataaagaggtattccaacctaataacttttcttgttgcagctgataaattgcagttcctgtcataattttttgtagcgaagcaatcggaaacaattgattagcgttaactatttggcttgaatcagtggtctccttattttggacaacaatcggttgcccctttttatcattaattaacattacaccgttgatatgatgaaacttcatataatcatgcagctgttctttctgattcttaatgccattatccagcttatcccctggctgcacaatgaataaaaatattgcaaaggcacaaagtgccaaaaagatggataaagctcgttttttatgcataaagattcctcttaattactatcccaagcaatgtaataactatatttcctcaattgtaaatctagtatctaaatagattcaactattgtgtgattttatgcaatgaaaaaacatgcttcattagaaacatgttttttcaagtcattttaataaaaacatgaacagcataattaccgcaataaatttcactgctcttatttcatgcactatactaaaaatagcttttctataaatacgtcacattcaaaaagattttgcttaaatctattgacagatatttttaatcttgctatcatattgctcaacaagaaacgaaaagtagcaactttgctcagcgttcagagaactggtggtagctgcaaaccaggcaggcaaagcttgacgaaatacatcgttataatgttgttcggaaaaattcagaaccgttaccatctgatagagattcaagttcttatgcttgaaagagtgggtggtaccacggctattgtcgtcccgttgactaataagtcaacgggattttttatttggaggaatataaaaatgaagaaaaagaaagtttcctttactgaatcaattattatcttaattgcactcctcactattctgggattggcagttatcaagcttgccctttctccagaagtgccagttttattcattgtccttttacttaccttttgggctagactgcgtggcttttcctggcaagatgttcaagatggcatcaaagaaggaattagtgtagccattattccgatttttatctttattttaatcggcgctttgatcgggatctggattaaagcgggaattatcccttccatcatggtcctgggtttccacttaatcagtggtagtttcttcgttccatctgtttttattgtttgttcaattattgggatggcaatcggtagtggttttaccacaatctcaactgttgggattgcgctttttgggatcggaactagtatgaaccttaatcctgccttagttgctggggcaattatctctggagctgtttttggcgataagatgtctcctttatccgattcaaccaacctttcttcagcagttgccgaaagtgaattattcgcccacattaaaaatatgatgtggtcaaccattcctgcttttgtagtttcattaattttattctggatcttaggcaacagtggcaacatggatccaactaagattgaacgtacttcacatattttacaaactaacttcagtatcagctggtgggcaattgtcccaattatcttgatgatcttttgtgcttggcgcaaaatttccgcaatccctacgctctttttaaacattgcgattactgtaatcatgatttttattcaaagtccccacgaatctattcaatcgcttaacaatttagttatgaacggctttgtggctaaaactagtgatgcttctgttaatgccttattaacccgtggtggtatttccaacatgatggctacagtagctttgatcatttctaccttatctttgggtgggatgctcatgaagttcaacattgttcaaagtgcaatggaaccactcgttaaacatttaaccaagcctggtcgtttaattacggtcaccattttatctggtatctgtatcaacctttttgttggtgaacaatacctatcagttatcttacctggtcgtgcatttaagccggcttttgataaaattaagctttcaccattagcccttagccgcgtacttgaagacggcggtagcgtaattaactacttaattccctggggtgttgccggttcattcgccgcttcaactttaggtgtgccagttttacatttcttaccattcgtcttcttcagtcttctttcaccaatcttctctattttgagcggaatcaccggaatcggcttgaagtgggctaaagaaaagtagaaaataatcatatcagtaaaaaagttcctaagaccatcgtctttaggaacttttttacgcaatctactagctaacggttgtgtcatgttgcaaccaattattactcttttcttgacattaccattcgatcattcacagcagctctttttggtatcactttataacctcgtcaaattcacttcaccagccttcatttttgggattgtctttaccgtaattaggaaaaatgaccagcaggcaaaattacctttaaaatcatatttttccgaccagtgggataataacttctttcctacttttgcttggactttattttatctcattgctatgcctaatctgcagcaacacgggcattttcacaatattgccacattcatctggcaattcttcagtgataatgccacacctcatctttggtacagcgtcatgatgctgcaatttttgcttatcatgcctggaatcaaatcagtctgcaactgggtccagcattcttatcgacgactactaatcgcagttattagttccggaattatttactttgcctggttaattttttatgatcacttcattttaaatggtcccgaggctacccattggtatttattagatcgtatctttatcagctttttgatctttgggctctacggtggcttaagctggaattttcatcatgaaattcaaacttttctgtttacatattggtggctaattgtgggattttaccttttaacctattttgggaccagagatttatttttagccactttcaaattaacagacctaaccaacgacagttattacctaccttcaatggcaatttatgctttagcggttatcctcttgatttacctaatctgtattgcacaaaaagtctttaatatgaactactggctaaaatcaattcactttctagctttttatgcttatcgagcatttttagccaatgttttttgggatcgtatcttttggcaatattttaattttaaacagctagctttacaaaatatttatttagctgtcttactactttggatttgtacatggtgtgcttcatatttatctgtttatgtagttcaccacctttggcttaaaattaatggttctgtcggtccatcctaatttgcgcacgtcgatattcctgactgtcacgcgtaggttgagcaactatatctgtaattattatttcatgatcatttcgttcaaagacgattgcttggtctaattccgcatttacttttttattgatagtggtatcttgattaaattttaaatcatccagctcccgatcaataaatgttttttgcgaactcgtcagctgatgatatttttctgccgcttctggagtaaaggacaagatcgtctcccgtctgaattcacctattttatctggatattcacttctttgaccacggatgtcattgtcaatatatcttttttccatcaaaatcacttcctttatatcttcactatacaggaggcgattttctttagacatctttctgcctactttagttttttcataagaaaaactttactattattcatttgaccactaaatacggtaaaatagataagacaagtaaataaaaggagtgtatatttcatggataacttttcaaatactccaggacggcgtcaagtccaggatatttctgcagttaacagcttcttgactaagatgtacagtctcatgattttggctgttttagtttctgcagcaactgcattcttgactacgactgtgtttgcatctgcaattgctaacatgtcacaagccgtttactggatcatcgtatttgttccaattgttttatgtatgacaatcagctttaaggcagcaaagaacccaacattaggcatcgttcttctgttgattctttccgcagtctacggcttcgaatttgcctttatcgcaggagcatttacttccgcttcaatcgctggtgcctttttatcagcagctggcgtgttcgcagcaatggccgtcttcggttctgtaactaagcgcgacttgagcaactggggttcataccttggcgcagctttgatcgggttcttagttgcatggctcgttaacgccttcttcattagaagtggcgctgcaacctttatcttctcctgcatcggtgtgttaatcttcactggcttaactgcctacgacgcacacaatgctaagaagattttcatgacctacggcggtcaagtttcagatactggtttagccgttatgggggctttaagcatgtatctcgacttcatcaacatcttcatgttcttgctacaaatctttggcatgggcggagatcgcgattaattaatttccatacaaacatagcgttgattagcttttacactagtcaacgctatttgttttgcttaaattttatccaccaacataaaattcgatatgttgttgtaaattgttgaattcaactggacaataaccaccaatttcgccatcaaggttaactggcaaatcttgtccttcacttttaccaatcaattccgccttcaagctgcgggtcttggtataaatgatatttggatcatcaacgtgcttaccattcaaagccaatgccatcaacttcatcatgctaacagggtcagaaggcttgaccacgatcaattggaataatccatcactaagctgtgcatcaggcataacttgctcaaaaccaccaattgaattagtcattcctagtaggaacattgataattttccttcataaacgccatcatcataagtcaaacgcatctcattctcagtcaagtgtggcaacatttctgcccccttgattaagtatgcggcataacccaaagctgacttaacctcagatggtacgccatatgttaactcagttaaagaaccgctggcagcaatattaacaaaatattgaacctggtcaccaaaaacagctttaccgatatccattttacgagttttattctttaagattactttagcagcatctggaatattatcacgtggaatggctaatgcacgagcataatcattagtagtaccagcaggaataattgccattttaggcctgttttctaaaaaggcaatcccgttaactacttcattgattgtaccgtccccgccagctgctacgattaaatcaaaaccttccttagcagcacgagtagcttcattgcgagcactattttctttaggtgtagttctaaaagcactagcttcgtagcctgcttgttctaatacatctaaaatatcggccacattctttggcatctgttcgtgacctgatacaggattataaattaatcttgcttttctagtcataattactacctaacgttctaaaaattaacgactttgcaattcttggttaagtaacttgttaaccatcttagggttagccttaccacgagtttgcttcatgatttgaccaactaagaagccgattgcacgatccttaccattcttaaagtcttcaactgattgagggttatcatcaacaaccttcttaaccattggagctaaaacagaagtatctgacaattgaaccataccattatcttcaacatacttcttaggatcagtaccattttcaatggtttcagcgaagaccttcttagcaatcttagatgaaatagtaccatccttaattaacttgatcatttctgccaagtgttcaggcgttaacttaatatccttcaattcaacacggtgatcgttcaagtaaccattaacttgtgtgttcatccagttagctgccagagttggatctgcacctgccgcaacagcttcatcaaagaagtcagaactttccttagtttgaagcaaaacgttagcgtcatatggcttcaaaccatatttatttacatagtcatcgtaacgagcaaatggcccctttggtaattccttagcaatttcatcgatccattcttgtgaaatatgatctggtgcaatatctggttctgggaagtaacggtaatccgatgcaccttccttaacacgttccaaaacagtcttaccagttgcttcatcaaaacgacgagttgaaagttggatgtgaccaccagccaaaagaacttgttcttgacgcttttcttcatatgcaagtgaacgacgtacgtgatcaaatgagttcaagttcttcatttcaaccttagtaccaagttccttttgacctgcaggacggatagaaatgttggtatcaacacgcattgaaccttcttccatcttaacgtctgaagcaccagtaaattgaacaatcttacgtaatttttcaaggtatgcgtaagcttcttcggggtcttccatgtcaggttcagaaacaacttcaagcagtggaacaccttgacggttcaagtcaacgtatgagaaaccgttggttccgtgagtgttcttaccggcatcttcttcgatgtgcatttcgtggataccgattctcttcttcttaccgcgaacttcaacttcgatgtaaccatcacgagcaagtggttggaagaactgagtaatctggtaagccttggggttatcaggatagaagtagttcttacgatcaaaatgagtagttggcaaaatgtgagcgtgggttgctaaggcaaccataatacctaaacggtaaacattcttgttaaccattggcaaggtaccaggcatagcccagtcaataacattagtctccgtgttttgttcagcaccataggttactggtgaaggagagaaaatcttgctctttgtctttaattcgaagtggacttcaagtccgatagtcgatttaaaattcattcaattagtcctccattccagttggtgttttttcataaaacttgttagtgcgttcgataaagtcagcagtcttgaagacattaccttcatcaaaacgcttagccataacttgtaaaccgacaggcatcccatcaactaaaccagctggaacactagctgcaggaatacctgctaagttggcagaaatagttaaaatatcattgttgtacatcttaattgggtctgaaacttcttcgccaataccaaatgctggctcagtagtagttggtccaacaattacatcattttctgcaaagatcttgtcaaagtcatcacagatcaaggttctaaccttagcagcttgtctaaagaaacggtcatatgaaccagctgaaagggcaaatgaaccaagcataattctacgcttaacttcagcaccaaagccttcagaacgtgatttaacgtaaacatcaagtaagttcttagtgtccttagcacggtagccgtaacgaataccatcgtatctttgcaagtttgaagaagcttcacttgaagcaatgatgtagtagtcaggaacaacgtatttagtatgtggcaatgaaacctcattgatcactgcaccagcatccttcaaagcatcgatttgcttttgaataacttcacgcatttcgccgctaactgcttccatgtattccttaggaacagctacacggagacccttaacatcttgaccgataaacttggtaaagtcaggtacttcacgggttgaaacagttgagtcatgctcatctgcaccagcaattacgtttaatacttcagctgaatccttaacgcgcttagtcattacaccaatttgatcaagtgaagaaccaaatgcgataagaccccaacgtgatacacgaccgtaagttggcttaataccaaaaataccgttaaatgcggctggttgacgaattgaaccaccagtatctgaaccaagtgctgctacaacttgaccactagcaactgcagctgctgaaccaccagatgaaccaccaggaactttatctaaattccatgggttgtgagtagcaccataatatgagtgttcagttgatgaacccatggcaaattcatccatgttggttttacctacaaaggttgcaccagcttttttaagcttagaaataactgttgcatcatacattggcatgtagttgtacaaaatgtgactagcagcagttgtcttaatcccgttagtgatgatgttatccttaattgcgattggaatacctgctaacttactcttggagtagtcaaggttatctgcaggcttagcatcatctaaaacagtgatccaagcatttaacttcttatctgtatccttaatgtttgccacagtgtctttagctaacttatctgctgacaagtcaccgctggcaagctttttgtttaatgaatcaatattttcgtttaagtaattcattactcgtcctcatccttattaataattacaggaaccttaatgtagccgtttgccttttcaggaacgttagccatcaatgtttctctgtcttgtccttgccagtgttcaggtttatcttctctgaagacagtatcacgatcaacaacttgaactgtttcatcaacaccctcagtatcaacttcactaagttgatcagccatattgataattgatcccatttgatcagtaaatttatctaattcttcttcattaaacgcaagtcgcgaaagagtcgcaacgtgtttaatggtatcttttgtgatttccacgcaaatacctcctattcgccgccataaacatggacttgataatcactatcgccggtttcttttgcaactaaagcttgtacatcatctactgaaccaattttgatttcaattgggatattgccagacaagtactttttagctgacgacaaaaccaaacgggtaaaactttgaatttgttcatagccataaaattgcgttgttacggaaatgttttcttgtgaaagcttaccgtttgtataacgcaaagttgccgttaccccactaatattagggaagtagttttgaatagccgtcttgaaatcattgaagtgcgatgcatcatcactgttaattgctttttcactaccagttgtcggtaaaacttgcattttttccgacatggatttccatttagatattttactactattagcggccgctgtcccgtaagcgaagtaagttccaccaactaatgaatcttttccagtcttggagaataaaccaatcgtaatcggaatattctttaaagctttcttcttacgcaagcgagcaacaatttcattagctattttttcaccttgagctttttgttcagcacgtgaaatagtagtttgaaattctgcaccgttacgctttttctgataataatcaaccgaattcatggctaagcccaagctcataccacctaaattatacttggaaccagatccagtcaaataatcttgttcgataatttcttccaaataaattggattacgcgtatcggttccggtcttaccattatttactgggtttaaaccatcaggatttgatttggatttacgcattaaccaatcagttacagttgaggtatccaaatattgtccttcttggaagacgtattgattaggcgaaaattgattcttagaaatttgaatcagccctcgctctaattcacgcgtatcaacagaattatcattatcagtagctgttaatcctgcaatcggactaatattatagcgaccatttttcattaaaacggtatagccattcgttcccgtgttagtagtttgatagctttttttcttagtggttgaagtggttgtcgcattatttgctaaactagaatccttcaacttaccacaaccacttagagtaagcgcgattccagctaaagccattacttgcaaatattttttcacaataattgtcctttattcaatttgtgcaattgcttcttcttcagtcaaaagtggtacgcctaaagtctgcgctttagtatacttagaaccagcatctttgccataaatcacgtaatcggtcttatgcgaaactgaacccgtaactttggcacctaaagcttgtaattttttcgtaaactcacttctagtataatgctctaatttacctgttagcactacagtcttatccttaaatggattatcttcaatttctgcaggctcatctgcacctaagtaatccatattcaggccgctctcacgcagctcatcaattaccttctgtgcttctggttgagcaaaatatgttgtcattgattccgcgatcgtcatgcctattgtatcgatagaagctatttcttgcacgtctagagacataatctttgccagatttttaaacttttgagcaattaagcgtgctgctttggccccaacatggtcaattcccaatccagtaatcaataattcaactgagttttgctttgaattgtctaaggcagttaacaaattattgatcgatttttccttaaaatgatcgagttgtgctaaatcatctgcagttaagtgataaagatcagccacattatgcactaaatctttagcaatcaattgtttaacgatctttggccccaaaccggcaatgttcatagctggtcgagaagcaaagtgcgtaataccctcctcaacttgagctggacaagatggattgatgcagcgcaaagctacttcatcttctaggtgaactaatttttgcccacaggatggacaagtcgttggaatctgataagctacagaatctgccggtcttttagccatgacgacttcagagatttctggaataatatcgcctgctttatgcagtttaacggtatcaccaatcctgacgcccttttcattcaaataatctgggttgtgcaatgaagccctagctacagttgtaccagctagttgcaccggatccatgaccgcagttggagtaactactccggtacggccgacagtccaaacgatatcccgcactacagtttcttgttcttcaggtggaaatttataagcaatttcccagcgaggcaccttaacagtgttaccgagctcttgttcaattcctagatcatcaatttttaacacaatgccatcaataccatatgttaggctgtttcgtttagctgtgtattcatcgataaaggcaaaaacttcatctaatgtttttaacttacgaccggtttcattggtatgaaagcctaaatcatgcattttttgaattgcttggtgctgactagtaatttcttcaggcggattaacccaagtataaataaaggtactaagttgacgcttcttggtaactttaggatcaagttgacgcaaagaacccgctgcagcattacgtggattagcaaaaactactagaccttgctcttctctttctgcattcaacttggcaaaggcttccttgcccatgtaacattcaccgcgcacttcagttgttaacggttcaggcaaagtctgtggaatatcactaatatacttagcattagctgttacatcttcaccaacataaccgttaccccgcgttgaggcacgaaccaacttaccattttcatattcaagcgatagtgataagccatcgatctttaattccacgttatattcaactggatgaccaactaatttttgcatccgttgatcaaaatccttcagttcagctttggaaaagacgtcccccattgacagcattggaatcgggtgctctaccttggtaaaatcactatcaatctgtcccccaactctttgggtaatggagtcgggtgtcacaatctctggaaattctttttctaattcaagcaagcggttgtagctttggtcgtaaacattgtcttcaacctcaggcgcgtccttagagtaataggcctcagcccattcattaagctgttttctaagtgaagccgcttcttttttagcttcatcaagagtaatttctgccatttttccctcctgatccaaatcaatctttctttaattatatcttcttaattggcgcaaaggcagccaaaagccgtttgattcctttaccagggaaagcaatatccagctccatatcttcaccagtgccattaactttagttacaacaccatgtccccaagctttatgctcgacttggtcgcctacattccagcccttcttttcagcaccgacagcgcctgaagctttcttagcagtataaacttcagcgcgagctcgttcggctttgcgagcaaatggtgccgtctgtttctcaaagctagattggataaagctgctttgtaatttttcattttcttctttgtgcagatcctgttcatcaatttcgtccaagaatcttgaaggcggattattttgcattctgccatacatcatccgtgagtaagcattagttaaaaacagttcttgcttagcccgagtaattcccacgtaagctaggcgccgctcttcttctaattcattgtcatccatcattgcacgttgcaacgggaaaagcccatcttccatgccaattaagaaaaccactgggaattctagtcccttagctgcatgtaaagtcattaaagctacttgattgtcatcttcatcaagatcatcttgatcgctaagtagagatacttcagccaagaagtcgcttaatggattagactcatcttcttcgggctcataatgatcatcaaaacgcttagtaactgacaagaattcatccaagttttctaaacgcgtttctgattcaattgtattttcagctcgcaaggcatcggtataatcaaaatcagctaagattttttcggttaaaccggttactgtaccattttgagcataagcaattgcatcacgtaatttagtaccaaaatcgcttaatttcttggctgctctagtattaattgaactttcagccacatgtcccatcgcatccaaaatgttgtagtgattctcatccgcaaatgttaacaacttatccacagtagcggcaccaattccccgctttggagtattaataattcggttcatactcatcgtatcagctggattagcaactaacttcaagtaagccatcacatctttaatttctttgcggtcatagaatttatgtccaccaacgatttgataaggaatattgcttttaacgaaagcttcttcgactgttctagactgagcattagtccgataaagaattgcgaaatctttgtaagcccgttttttatctttaacttcttcttggatctttgaaatgatgtagtgagcttcatcatcaccgctttgggcttgatagtaggttaccttttgcccatcaccttgatcagtccacaagttcttagccttccggttctggttatttttgatgaccgagttagctgcggacaaaatgtgaccagtagaccggtaattttgttctagcttcacagtcttaacatcatatttcttgtaatcctgctcaaaattcatgatgttttccatattagcaccgcgccagccatagattgactgatcggcatccccaactacacaaatattcttgtattgtgcagccaaagcatgacagagttcatattgagcctggttagtatcctgatactcgtcaactaaaagataacggaacttgttttgataatagtgcaaaacttcgctatcttttttaaacaaaactagggtctgcataatcaaatcatcaaagtccataatttgatcacggcgcaatctacgttgatattcttcatacaccttagccgccatcttctcaaatggtgacaatgcactctgcataaaagcttcaggatccagcaagtcattcttgccattagaaatcgcggctaaaataccgcgtggatcatacatcttaggattgatattcaagtctttttcaatatgcttaaccaaagttaattgctcggccgaatcagcaattgaaaaattatgaccataaccaatcttatctgcatcccgacgcaagatccgcacacacaaagcgtggaaagtcgacatccaaatgtcgttagctgctggtcccagcaacttttgttcacgctcacgcatttcactagccgccttattggtgaaggtaatggctaaaatattccaaggtgcaacatgattttcttcaactaaataggcaattcgtctcgttaaaacagaagtcttacctgaacccgcaccagcaacgactaataaaggtccttcagtggtttctaccgcttctttttgttgcggattcagaccagctaagatagatttttcgctcattattttccccttcactaaaaattatttcattaatgcaacttgaatattataccaaaaaagcagcgactaattcgctgctttagatttacttatcatatttttcaagatcaaactgttcaatcaaattaatcagcttatcggcatagtccggatcagtcgcatagccgtcggtaaccaaggctttagcttgtgtcttataatctttggatgctagaacatgcttatactgatcgtggttccacgttgtcccattctggaataatctagcgtgagcccgaatagaagcctcatatgagtcatatatttggaaacgcgccttcacggtaacccacttattctttacatattccttagttgtcatcactgccgaagtgttcgggttggatcctttaacaccaaaaagattgttgtatttttgcgacaaatcactttgtccataattactttctaggcaggcttgagcaatcgtgatgcttggcaataagtcatacgacttgtccacttcgcgcgcaatcggaccaatttttttgataaagtcttttttctgttttaatagttttgctgcttcctgttctttttgcagctgtgcttgttgaatctgctctgattgaatcgcgtaacgcctataatatctaaagccgacaaaagcaaccatcagaataaatagaattacgaatacacgcacaacggttttgacactttttggtactcttgatttacgttttcttgccatagttttattccctttaattactaattaaagtataaccgatttttgagtaaaaaaaaagaagtcgctcactgcgactcctcaatcagtgcgggcgagaagactcgaacttccacgatctaaagcgatcacaagatccttagtcttgcgcgtctgccattccgccacgcccgcggcacatcaactataatagcctaaatacagttgagatgcaagaaaaaatataaattattttaaatttctgatcattttacgcaaaagtttgcgctaaacgcaggtgtcccctacatttaccacaacgatacttttgtgtattaatcctgcgcattcttgggtatctcaacccacagttttcacaaagatataggtaacgatattttttctttttacgtaagccaatatcaggtgcataacgactgcctccaacttttttcagcaagattttaaaattgcgatcacggtgtcggtaacccaagcccaataaatgcaaatgatagtgggttaattcatgcttaatgattcctactagataatcatgatattgtggtactaaaaaatgcgcgttgatttcaagatggtgatcatccaaatgataacgcccacctgttgtggtcattcgccgattaatttttacaaggtgcttaaaagggcgatcaaaatattttaacgaaattttttcaactaaattttgtaattcattctcattcatggataaaattttattccaaaaataaaaatcagcaagaatttaatctcgctgattttttgctacctaaatatcttggcatacatccccgcctgcttaggcgtactaatgtgtcgtttcaagaaagttactaagtcatgtttgaatgactttttaccatccatccaggttccagtgaataagtgaatcgatttggagtccttagaaggattacacagaactccatctgaatagacatgaatgccatcttttaacacttgctcctgattacctagctttaagccatacttatttaccagcatttcagtaacggaaatactatttactcccgccatctgattcttagtgtcatattcaaaatcacgatcttgataataatccaaaatatcctgcataaatgggtggcctttttctgcaccaaaaattgcagctgacagataatcatggttttcaaaaccaataaaggcagaagcattcaaaagactatctaacttatccacgactctaacatcagtatctaaatatatcccaccttgttcataaatagcccgtgctcgaacatagtctgacacgaaggcccatttttttgcagcataagcttgttcaatataacgattctcatgcatatcaaaattatcttcattccactcaataatttgataatcaggcaattttttcttccaggttgcaatacattcttcaattatcggggatttaggattgtgtcctacccaaacataatgaatttttttaggaatcatttttaacctcgcttcaaaaagttcttaattagcttcacaatatcatcattaaaatcaagcttgaacaagaacatcaatgtcagataaataattaacatgacaattgacttaaaagccatatcgaaaaaggcagatggaattatattaggcataaacattccaatagccaaggttagcaccgcaattaacaaatacttgggcacgtcatggaaaacataactaaattcatagccatcacgtacaacccagagccgcaaaattaaaactactgcttcagtaattaatattgcaatcatagccccacctgcgccatatggcctatctaagagataactcaagacaatttctaaaattgccccaataactactggcacagcataatccttgtctcgctggttagccaaagcaaattggttagcaaataccccgccagtcggaatcatgataattgttaaggtaaaccaaaacattaatggagtcatcggaacatatttattcccaaagaaaaatggtacaaactgtttggtatttgccataataattacggcgaacaaggtacccagcattacagtagcttccagtgattttttcatcactatcttttgtgccttttttccttcgctcgccatcttaggcataatgactagcgaaatactggtaattacacccagaatcatatttgaaattcgttgtgaattgtcataaaaagaaacctgagtcgaattagaaaaccaacccaaaattggtttatccagcgaagtataaatttgagtcgcaatctgtggaatcatcaaagtaccaattgcaattgccgtctgtttaaatttgtaaaaatgagcaatgggttttcctacatagcgccaaatatcaaaccaaaagacaaaggaacctagcattgtcgacactgacatgatcaataaatatttccacaagtcagcgggtgattttacccataataaaattagaaccacactaactaactttaccgccgtgtttttcaaaacaacacgaccaaagtcagctagtccttgaaagaaccatgaaatatcaacctgtgctgagatcaagtatggcaccatcaacaagatataaaaccaatattgaacgtgaaatacagtcgctacaaaaaccgtgactaaaatggtgataataccggcgattccttggaaataccataacccccagaaagcattggttagctcctgcggtgtaccataagtgcgcgtccgtgaaattgttcgcatccctacatacgacacagacagaatacaaaaaatcatcaagaattgcaccgtattgttcacactgctataaatcccataagtcttaggacctaagacacgcgataaatacggtacagtaatcagtggcaccaatacaataaaaatctgataaaccgcattatataagatgtttaaaaatgttttacgcattttaacctcgatattcctgcgtcatgtacttaaagacgttctcacaatatgaatcaccatgcacctggttagtcaaatgtagccagtaaagacggcgattagcaatctgctggttatcaagttgatccagattgcgaattagttcatcctctgaattaacacagattccgggagtaatctcagcatatggtcccattagtaatccgcgcgttttttcatattgctctaaaaagttagtcacaaacacaatcggtttgttcaagtgcaagtaatcaaagtagattgacgaaaagtctgtcatcaagaaatcagtatcaccgagcaattcgtacaaatcataattgtggtcaaacaagtaatcattgttcatgaaagcaatgttagaataactgctcttgaaattggcaaataaacgcatttcatagggatgcaattttacaatcagatattgatgccgcttctttaattctgtatttaatttttcaacatcaaaatcccgaaaggcaaaaaagtttctctctttgattttctccataatggatttatcttccaattcataacgaaaagttggcatatagatcccgatctgtgcctgatcgtcctcagttttaaataagtcagccaacaattgtttcttcgaaattaccggcttagccaataaatccaaacgcggaaagcccagcttgcggtatttttttgtctcaattgccatacaagcactcattagtgattcatatagatcagagctagaagcaacaatatccgcattcttgtgccacaatttttcgttacggcgattgtcgcgtcgcttagtattattagccataattcccatgcgcttgagtggaacgccatgccacaactggacattaatttgatgcttgcgcaccttaaatggttggtgcgttgtaattacatatcgcgctgctccgattttctgccaggttttccacttcaagtgtgacgatggccacggctcaactaatgtaacgttatattcaggatgattcaattgcagccacttgtaaaaagcatagccgttagatccagacctacctgaaccattcaggataaccacattattgttttccatcgtggtaaatctagccaaaaaactcatccaagccaaataaagacggaataaaaagcttttcattaaaatacttccttaaaatagtctaatacctaaagcatataaaaaaagcttgagcaaactcaagcttttttctttatttttgttaaactttattctttacccatttttctctggcagaatttaacaatttcaacaatcaaaaccatcaaaattccggcaattaaaatgactaaccactgtggtccatcaagttcagtcacatcaaagaacttagtcataaatggcaattctaccgctgccataattacagcagcaatgataattgcaccattgaaccacttgttagaaaaagtatgcggtctaaaaatcgactgatgtacatacttggaattaattgcatggaacagctgaatcaagcccaaagtcaagaaggccattgtcaatgcatccccatgttgcaacgatggatcacccacatgtggaccgacatgcaaaccaatttggtatgcacctaaaactaaaattccttccaaaattccttggtaaataattgaactggcaacaccaccgctaaagaagttagacttcttaccacgcggcttgcgcttcataattccaacttccactggttcaacacctaaagcaatagctggcaaagtatccgttaccaagttgatccacaagagctgcacaggagctaagatatcccaacctagcattgtcatcatgaaaactgttaatacttcacccacgttacaactcattaaatatagaatggccttttggatattactgaagaccttgcgtccttgctttactgcttcaacgatcgtggcaaagttatcatcagccaaaaccatatcgctggctcctttagaaacttcggtcccagtaattcccatgccgattccgatatcagcttgcttcaaacttggagcatcgtttaccccatcaccagtcattgcaacaatcttgtcattagcctgccaagccttgacaattctaaccttgtgctctggtgaaacacgagcgtaaacgctgtagtcaccaacatgctgtttgaaatattcatcatctagtttatcaagttcagccccagttaaaacgcggctatcctgacctttttcaataatacctaggcgttccgcaattgcttgagcagttgtttggtgatcaccagtaatcattactgttctaataccagcactctttgcttcagccacggccgctttagcttcaccacgttctggatcaatcattccgactaacccagcaaaaattaaatcttgttcaacattatcagttgttggatcggtgtacaattggtcgactttcttataagcaagccctaagacacgtaaagcttgttgcgccatctgcttgttttgcgctaaaatattttgcttctgcttatctgtgatcggctctacttgaccaccattttcaatcctagttactcgctgtaacaacatatctggtgcgcctttgaccgctacaaagtattgctcgccatctttattaacagtactcatcaatttccgttctgaatcaaaaggcacttcttgaatccgtttgtatttttcaagcaagtcagttacatcaatgttttgatcaaaagcaaattgaatcagggcggtctctgttgggtcacccaataagtctccgccattttcaatcttagtatcattagccaaagtcattgccaataaagctgggttattttcgctaatactttcactattatcatgtaactttttatcatagaagaccttttcaactgtcatccggttctgggtcaacgtaccagtcttatcagaacaaataatgtctgtagcacccaatgtctcaacagcaggcaatttacggacaatcgccttatgtttggccatcgtttgcgtacctagtgccaaaataatcgttacaattgctggcaagccttccggaattgcagctacagccaaggaaacggcaaccaagaacatgttaatcattaaagtagagttacgctctgctgaatcagccttgagcactcctacgataaagacaataacgcagattgccaaaatcatgatggttagggtctttcccagttgattcaagtttcgctttaacggtgtatcagtttcatcagcattgttcaacattgtagcgattttaccaacttcggtgtgcattcccgtactagttacgattccttcaccacgaccataggtcacattagtattggaataagccatatttacgcggtcagctaaagcaatgtcttcaccttctaaagtttctgcatgcttttcaactggaactgattcaccggttaacgctgattcctcaatcttcaagctgtgggcttgattcaagcgtaagtcagcaggaaccacatccccagcttctagtaaaactacatctccaggaaccaattctgtgcttggaatagtaacgattgtatcatcacggcgcacatgcgcatccggcgtagccatttccttcaaagcatcaatcgcagcttcggaacgtgcttcttgaaagacacctaaaattgcgttcaaaatgaccacaatcataataattgcggcatcagtccactcatgagctaataccccagacaaaatcgcggcaatgatcaaaacaataatcataaagtctttgaattgatcaataaaacgcatgaacatgctttgctttttcttggaagctaaggctttcggaccatattgctctaatctagctttggcatcactagcacttaacccatccttaacggacgtgttaagatctttttcaatgtcggggatcgactcgacataatattttttcgccattttccctctgctatataaaacatagaaacatgcagaagtttgatattttccacataccagaaaaaaatatatttttcctttcctaattttatttactgtcgtcatcattggtattccgatattccatctggggagtaatcgcattgaccaactcctgcagcttaagggcttagccagccccattattttttattttgttaatgccaataaatttaatactgcattgtcatcacgatcattgctatagccacactcataacaaacatattcattgtgcttggtgccatgttttctattgccctgcaaagtgattttgtctgcaccatttttgacatagccgcaactggcacatctttgcgttgacgggtagcttctatcagccaaaattagctctttatcataccaagcacatttataggataatatctgtctaaatttgccaaacaaggacctctgtatgcctttggaagccacatgcgtcatcatcatttgcttgacattcaagtcttcaatgacgatttggtcataattatttgccagctcagtagtaaatttttgcaaaagatcattctgaatattgacagccctgcgataatcacgctgaagcttggttctcacttgcacgtaattattgcttcggccagccaattttccattaacccttcttttcttggccaatattctctgataatgcttgatccgcttgtacagtttctgcagtcttgccggcaaaatattgattctgccctcagtatagctgaagtgcccaacgttgacatcgatggcggtctttttgccagttttaacctttattccagctttttcttcgtaggaaagagcagcgtaataatggcctctttctctaaagatgctggcaattttaacctgtttcatcctcaatgcttcatatgttggaatatcaaaccatgatttaattcctctgggcttatccagtctgagcttgccattaataactttagctcggtcagtcttaaaaccttgacgtggagctttctttgacttgaaatgcggcttgccccagtcgagctgggctttgtcaaaaaagctcttccaagcgttggccaagtccttgactgccaactgcagacaacgagcagacaaggtaaactgccaatcagccttgttattgactaattcatctcgcacccgacactcattaggactaggattattatccttatttaaagtccgtgcttcatacatatcttgccaggtttctaaggctagattccagcagtatctgcggtaatcgcatagacggtcaagttctctttgcatggtcttgtttggttttagctcagctacctgtgttttaatcatttatttcacctccaatgcaaacataagtttagcaaaggatgaaacaaaaacaagcgaacaaaatattaaatttttagcagcagctaatttgtttctatgttttatcttcctgatcaaattaactgcatctttttctatttattgctatcaaatcctatcttttagtcaatcattatttcctcctcaaaaataaaaaagagacttacatgcttgtagcacataagtctcacgaattaagataaatccagaagtatcttacttcggctgttggattcatcgcaagcaattgctgttactcccttatgacaagttaattataagcaaaattttagctatctacaagttttagcgaattgcttttactttttataaaagtcatcaaagacagtaactggcaaatgacgcttgtgtttactcttattccataatttttcaatttgatcagctgttttatctgatacttccttaccttcaaggtaatcatcaatctcttggtaagttacaccgagggcaacttcatctggcaaatctggcttttcttcttcaaggtctgcggttggagccttttcatataaatgcttaggacaacctaattccttaagcaaagccttgccttgacgcttgtccaaacggaacaatggcgtcaaatcagcggcaccatcaccaaacttagtgtaaaagccactaaagttttctgcagcatggtcggtaccaacaacggcacccttattagcaccagcgatggcatattgaactaccattctttgccgcgccttaatattgcctttgttaaagtcagtaatcttttgaccagttgcttctacaaccttcaccatagcatcaactggttccttaatattaacaattaaatcctgatctggcttttgaaaagcgactgcatctgcagcatcttgggcatctgcttgaacgccataaggcaaacgaacagcgataaattgataagaatcatcgccagtttcctcacgcatttcttcaattgccatttgacacaatttaccagtcaaagtggaatcttgaccaccagaaatacctaagacgtatgacttaagaaatggattagcctttaaataatctttcaaaaaatcaattgaacgtctaatttcttttttagggtcaatttctggtaaaacatgttcataagcgataatttctttttgtaattctctcatcgaccaatgcttctttctctaattttacgccgaatgtcttgaatcaaatccatcttggattcgtataagttttgtgataaatccactggatattcctgcggattcaggctacgcttatattcatcccataaaccatcaaggttgtcagcacagaattttttaatttcatcaagactaggttgatcataaactaattttccatctttaaaaatatcatgtaaaagtggaatagcagtgtaatcagttaccaccttattaatatagttatattgtgggtggaacatgaagagcgcgtcaaatttgcgtggatcttcattataccgagatacccagtcaccttcatttttcttagcagtgtttgcgctaatccgccatacttgttttttacctggggtggaaactttgatggcatttgaagaaatcttcaatgtatcccgcatggcgcctaattcatcttccatggcaaccaacttgtaaacagcaccaagggctggttgatcataagcagtgatatacttggtcccaatgccccagacatcaattttagcgccttgcatctttaagttagtaatggtgttttcatcaaggtcatttgaagcaaaaatcttggcatctggatagccagcatcgtctaactccttacgaacttgcttagaaatgtaagccatgtccccagagtcaattcgtacgcccaagaagttaatcttgtcgcccatttcattagccaccttgatagcattaggcacaccactacggacagtatcgtaagtgtcaaccaaaaaaacacaattcttatgtgtttccgcatatgccttaaatgcgtcatattcactgccaaatgcttcaactaaagcatgagcatgagtccctgaaataggaataccaaacaatttaccagcacgaacattactagttgaatcaaagccgccaatataagcagctcgagcaccccaaatggccgcatcggtttcttgcgcacgacgagagccaaactccattagaccatcatctttaacagctaacttgattctagcagctttagttgccaataaagtttggaagttaataatatttaaaatagcagtttcaactaactgacactgggcaagtggaccttcaacttgcaaaattggctcgttagcaaaaaccagctcgccttccttcattgaacgaatagtgagctttaattttagattgcgtaaataatcaataaagtcatcatcgtaaccttcattttctttcaaatattgcaggtcactttcggtaaactttaaattctttaaatagttaatgatgtgttccaaaccagcataaacagcataaccgttgccgaatggttccctgcggtaaaaactttcaaaaacggcattgcgatcagcaatccctttcttgaaataggtatacatcatattaatttcgtataaatcagtgtgtaaagccaacgaatcgtctttggctaattctggataaaacattgcttctctttctgtcattaaaaattaacaatttcgtttttcattatacagccattacagtccattggctattctcaaaactatttttacctcaaaattagatacactttttcaattgagtccagttgatttttaatagaaaaatgctcttccgcataccgcttttctgtattagccatctggcgtaactcttcatgggttttattaacggccagattaatctctttagcaattgaatcaatgtctcccgttttagcaatgaaaccatattcgggtcctggaatcattttatgaatatcacctacatctgtggacaaaatagggattaaattgtctgttgcctctaaaagcacaagtggaaaactctctgaatatgaagttaagacggctagatcaattcgcttatataatccgctcaattggtgttgagtcataaaaccgtgaaaagttacttgtggtgccatgtccaattgccgcgtcaaggccttcaatgcttcaagctgactaccatcacccgcgatatgcagacgaatatgctgatcatctaattttttcacagcttttaagagcaattcttgtcctttaaccttttccgtacgagcaacgttaataatattaaaataggtatgttcatatttagctggaatttcactatcactgtggaaaaagatgccattatagatgacatgtaccttgtttttatccacatgtgcgcgattaattagtagcttggcaaaacgctgagttactacgaaaatacaatcagcttttctcaacgcacgtaaattaagtttagtaaaaatattgccaatgattcccctaccttcaaagtctagataaggatctgaatgtacagtaatacaccaagttgcacgaattcgcttgtgaatcaaagataaaaataagttggcacgcgcaccatgagtatgcacaatatcatagtgcccctcattgataaacttagtcagtctacctaaactgcctaagtcataacgactattagctcctagcacatgtgtagtaatcccagccgctcttgctgcttgtgctactggtccttctgccagcgttaataattcaaaatctttgccttcatttttggcttcagttagcaaattaacaatatgtgataaaccgccgccattttctaaaccagcatttacatgcaaaaccttcatcttagtaaaattattttcccttcttttttgactgtttaactcgcacaacaaactgtggcaaaactaacatccgcttaaatctgctaggattagtaatcaagcgataaaaccactctaaatgcgtcttttgaaaagcttctggtgctcttttaacgatacctgaaaagacatcaaaactgccacccacacccatcatcaaagctggtgtttcgttcttacgtaagattgataatagtttttcttgcttaggaaaacctaatgctgcaaaaaccatatcgggttgtgccttctgaatgcgccgtgccactagttccaaatcttcagtaaagtagccgtcttctgcaccaactagattaatatttgagtattccttagcaattttgctttgtactgcatgaattacttgtggcttagctccaattaagtaaactcggctaccacgatcgctagcaacatccatcagccaagtaaacaaatcatatccagtcacccgctcaggtaacggctgcttaagcattttagctgcttttacaatgccaatcccgtcagcagtaatataatcgggatcattttttagaattttcataaattcaggattctcgtttgccgccatcacaatctccggattagcggtcacaataaaggtcgacaggtgattatttagtcgattaataaattcattttggaattggttaaaagttttattatcaaaatcaacacctaaaatattaactttgctcattttcacacctcatgcgttttcttatctagtttctattctaccattccgacacgcaagtacgagaaacatgttcaagttttatattttattcaaacatgataagattgttttaataaaggagaaaaaatgaaaagagttattacctatggcacctttgacctacttcactacggtcacgtgcgactgcttaaaagagctaaagaattgggcgactatttaatagtaggtttatctaccgatgaatttaatgaattcaaaaaacacaaggaagcctacaatacctaccctgaacgtaaatacattttggaagctatccgttatgtcgaccaagtcatccccgaaaaggattgggatcaaaaaatcaccgatgtacaaaaataccatatcgacacttttgtcatgggcgatgattggaaaggaaaattcgacttccttaagccttattgtgatgtggtttacctgccaagaacgccaggaatttccactactaaaattaaagaagatcttaaataaaaaaatactccaattccattcaatttgaatgagattggagtttttgtttacttagaaaaagtgaattcaaatcgttctgcaacgtaacgtgcgcgggtgtattcgaatggttgcccatctgctagttcagttacctgtcgtctagtaattaacggttcaccttttttagctttaagaagacgcgcatcttgctcgttggcaattgatgcagaaatatgttccgtcactcgtccaatggcaaaaccaccgcgcttttctaaggttttatataagtgcgttgaaacatcttctttagaaaaattctttactaagtagtatggcaccgttacgacttcataacaaattggtgtcttatcagcgtagcgaatccgctccatccgcaaaacgttctcattatcttttagcgcaagacgctctttttcagataaagatggattgccaatctgataagaaattaacttacttgaaggaacttgaccattagccttagtaatctcagtaaaggacataattcctgacattttttcttgaaccttttgactagctacataggttccgctacccaagcgccgttctaaaattccttcatcttctaatgttttaatcgcttggcgtaaagtcattctcgaaacgccaaacttaactgccaattgacgttctgctggaatacgatcccctacttgataaacgtgattctcaatatcacgcttaatctgattgtgaatcttgatatacatcggttcttccatagtcgccacccccaaagtttagtactgctattattataatctaaattggtctagcttgcattaataacactgcttcaattttacagactattttttcttagcggtccacttcactccaagaatataaacatttggacgcttgttatattccacttcaacttgttcattatcattagcaactacactggcactaaattttgcttcatctttaacagctaagttagcctgattaggattcagcacaatattgtggcccttcatattagcttcaccgctcaaagctaaaaagtactcatagttcatatttccagtgaaggtaacacgtgtagcatcacatttcgcctgatcttgaaaatctgcatgagctaaaattacggcattgttcattgtaacttttgcttcatcaactactatcattcgattgatggttgaattttgaatgattgtccgtgtctttttatcaatataaaccccacccaaaaaagtagaattcataatattgctccagcagtcatcacttaaataaaagcaggaatcgctagcagacttaacttttgaattaagcatattcatccaagtttgcccatgcagtaatacataatctacttccgaattattaagatccaactccgcattcgttttggcaaaagtattaatactgccgtgaatctttgaattatttacaattgctgttccttcgccttcaattgccaaagcacaatatttgtccgagaaataatcaatttctgaatcattcatttccaaacggaaattggcatggtcatacatggaaactgaaccgttaacaattttggttgaataaagttccaacgtgatcttaccattaaccgcgatagctgctgtatcagttcccgtgcccttaataaagcaattacgcaaagttaaatagccatcaacgcctactggtacagataggctattatgttcggtagttgtatcaatgcataaattttctaaagttacataacgactatcttctgaaacactaatatagccataaatagtcgtgtcttctggcaaagagcctgttcccttaattgtgatatctgttagtgtgatgccctgcggcaaataataatatccggggcccagcatcaacacatcatcggcacgcaaatcctttaaaacctcgtgccaactgactgaactgctagatccccctactctaattatcctagccatccattatcctttcatctcgtaaaaaccgattactattgtactaattttctttaatttatgttgtatttttgctcatcaaaaaagctaggttcgattcctagcttcttatactatttcattttaacattccagtaataagccacattaccataaggagaaagttggaaacctttcactctcttattcaataagtatgacgtaccttgttggaatagtggtgccgcaaaggcatccttttgaattaattgtttttcagcgttaactaaggcattcaatctcttctgcggatcagtggcataagttgaacgagccaagtcaatttgcttccagaaattggcgttgtgataatctggcgctaaattaaacaaaccaccaactgtcaagaaatcaattggatcttcataacttggctaccaagttccgtaaacaaagtcgtaattgtgattagttgtgttagatagccgtgacttcaaaggaattgaccgtacccgtagagttagaccaggtaaatttttcatcaaattgctttgaataaattcacccacacgcttagcatcgtcaatatctgaagtaagcaattctaaggttagcttcttcttacccaattgcttcaaaccaagttgccattcctttttagcttccttggcattataggtaaccaagtcgccagcatccttgcggtaatcgttgccagttgcctgatcggtaataaagtttgcggcaacaattccatttgacaccttgccttgatgcaaaactgtcttgactaactgttgcttattaattgcccggctaatggcccgacgaatatgaacattgcctgtactcttacgcttcaagttgaaagaaagataaccattagttggcgtaactttggtatgatagctagaattattttgatactgcttaacaaaatcagaagtcaatgtcgtgtaatcaagttcaccacttctgaacaagttaaccccagttgaaggagtttgaaccacttgtacgttaactttattcaaatcaacaattttcttgttccagtaagttggatttttcttgtaagtccacttcaaatttgaacctgtccaaccagatacggtaaatggaccattgtaaactagattcttactgctagtcccatacttagagcctaactttttaaccaatttagaattctgaggatagaattgtgcaccctctaagatttgtggcaaatatggaattggattagctaatgtaacttgcaccttatacttgccgagtgctttgattcccaatgaatttaccggtgctttaccttgagaaattgcctcaccgtttttgataatggcataagaatcggcatctaaagatgaattttttgggtcaacggttctgcgccaagccgttacataatccagggcagtaactggatcaccgttagaccacttagcattattgcgtaaggtaaaagtatagaccttctggtctttagaacgttcaacttttgtcgcaccagctaattctggctgatttttcttattaaaacggtaaagaccttccatggaattctgcaaaacttctgaactagtcgtatctccatacttgctcgaatctaaagttgaaatttcatttgtgacagaggtattcattgtcttagtcggtgcagcattactgtcattgttagagcaagctgccagcaccaatgcggcagctgctgtcatcactcctgaaaaaatccattttttacgtctcaatcttctcaccctttacttactttttgtttaatacttacattttacaagtatatctaatacggaagaaatttcaaatactttttccgtataatagctataatcaatacgtatacaaaaatggcaaaaaaaagaaacgtcacataggacgtttcttttttcgggttgggtgttcttttagaactattgggttagctggattcgaaccagcgcatgatggtaccaaaaaccattgccttaccacttggctataatccaataccagctgaactttttacttgtcgttcaacaatggaggagggtggattcgaaccgccgaactcagagagagcggttttacagaccgccgcgtttagccacttcgctactcctccgttagctgacttaattataataacgaaaatccaaatcaaatgcaagacttttttgaaacttttttcaaaaaaaagaagaagccatgacgacctcttctcaaaatttaaaaattgatttatatctaaacagttaattttaagcctaatgccttttgtgctacttgatttaccagactccattgcttgtcataagttggtgaaaagaagaaatctgcttctgctaaatcttccagtgtcaacttatttctaatagctaagctcaaaacattggcttggccactaatgtcatatgatgaaagtacgctaccgcctaagatttggtggctgtcttcattataaacaacagcaatatagcaagtaggattatctttttcaggaatatagtctggacgaagataactctttaagactgtttcttttgcattaattcctgctcgcttggcattcttttcactgagtcctgttgttactgcatgtaaatcaaaggcttcaagcaattgtgcaccaactaagcccctaaagacacgttctggcttgtcttcaaataagtgctcaacaacatattgagcctcatgccgtgcagcaatggcagatggcatcggtactcttctgttagctggaatgctaaatgggaagattgcatccccaattgcatagacatcctttacattggttctaaagtaattgtctaccttaatgtagccattgtcataaagatcgatcgtgtttttcaaccaatcagtatttggcttaataccaactgtaataatgacacaatcagcagtaatatcacccttatcagtctgaactgcattgacctttccattgccaacaaagccagtaactttagtgttcatagccaggttaacaccatgatcagtcaattctttttcaaataagctagtataagtatcattcaaataattttctagtggtttttgcccaccgtcaattaaagtaacattcttgcctgctttagcgaaaacctcggcagctgcaattccgttaccagcaccaataactgcaacatttttaatagcttcatcttgagcagctgcattgatctctgtagcgcaatcatagcctctcatcaacataatatttttcaggtctgctccaggaagaggcaaacttgcggggttaacacctgaagaaataattagcttatcataactaacttctttggttgtaccatcttttacgtttttgacagtaaccgtctttttagctggatcaagagctgttactgctgtgttattaacaactttaccaccccgttcaactagatcttcaggagtaaagtttctaacgttgtcttggcctgtagtttttccttcaaggaatagcttcattccgcaagacataaaggaaacgaagtcgcctgcttcataaatcgtaacgtctacatcatcataacgatctaaaatttcataagctgcctcttggccgccgtgggatgcacctacaataatgattttcttttttgacatagcctgacctcctaataatgcagcaataattgtcgtttttaagtaatagcagttattgtaactggttacattatttatcttttaataagatatttcaattaatttgcttttgattagtgcgaagcagcaatatattttttatataaaaaagagcactactgatagtagtactctagagggaaattttccaaaattatcttatttagctaattctgctgatagatttcgttcactaatttagtgatttcattacgattaagaacttcatcatacatatccattgtttcctggattgtattttctaaattagtaccatgatttttggcatagccaataaacttttttgcatctactattttagcttctttaatcgctttttctgcagctcttttagcaacttcattcatctcatattctggcttattcatgtcttcgacccattttccgctattcacgtagtagtcgatatccttctgcaggctgatatccctgcgtagtacatcatccgtttttctagatcatttttacgtgttgtttgcatctcaatatcatacactcgactttgatcatcttgtgcccagatatctaagcgaatgtttttggattctagtccaatgttgccgtcatactgggtaatgacattaacttttgtcaattttaattcaggaaacatccgacgtagcagttccagacaattctttttattgctcataacatgaccgaataccaagtcgttagtaattcgaggatatcgattaattcttctcctcatattttacctcttttctttttcttaagtaggaaaattaccctccactatttattactcaaaaaagtgcaaatttttcagaaatttaaaaatttagacacgaaaaaagccgatgcaaatgcatcgactctttcagttaaattattctactttttaatagaagtttacagccttgatgtaacgcttgttgttgtttctgcagccttcaattctgtagtacttcttaccgttcttaaatctcatttgaccaccgtaagtagttacagtttgacctctgtacatcttaccagtacctggagtacgacggtatgatgaccaataaatgtaggcattgtgcttaaaagtacgttggttaccagtaatgttggttacacgaacgtattcgtccttgttagccaccttgtagtaagtcttaccgttgatagttacaacagttggaacgatttcaatgtcgttgtaagcgtagtacatgtgacctaagtagttaccgttcttgtcataagctcttgaatcaaccattactggcaaagtcttggtgttagtgtcaccagctggcttaacaagtgatgaagtcttaacccaaatgttgcttgagttagcatctgacttagacttagttgaaacttgtgagtatgatacattgttaagggttctagtttgatcagcaacgtaaacagtgtcaccatctttgaaagtagttgaagctggtcttacattaatgccataaatgtggtaagttgcgattgagcttgcgccattagcatatagagcttgtttgtggcttgaagtaattaaaacagtgtatgttgcagtagtcttcttaccagttaaaccagtagcagttaaagttacattatagtaacgtcctgcttctgaagtattaacaggatttgaagttgcttctagtgaagcagctgtattattattgctgttttgtacagctgaaataataactggctcaccattactatttacaaaattagttggattaaattgtgaaccaacagctacttggaatatttgaccattaacactccccttgctttgaccattcaatgaccaattgatcactggattttgagtagtatctgtagttgaacttgaacctgaaactacaactgggatttgaacagtagctgtttgcgtagaagtagaacctgtaccagttaaagtaagattgaaatcactagttggtaccgcagtaatattcttgttatctttacacctgcattcttaagaatagcagcaacttcactatctttaaggttaactttttctccactggcattattcgtactaaagaaaactaatcctaaatcattaattgccttagtaacactagctacagtatctttagccttaatagaaatagtagttggtacaacattagctgttttatcggtagtacttgcagcatcaattacttgattgccatatgtaaagtatgatctatctgttggctttgctgttgttgctgtagtagtacttgtagtaccagtagtgttagttactgtacctaaactaatagcagcgttaactggaacagctgaagctgctacaggagcaactgccaacaaagcggcagcagccatacttacaattcttgtattctttctcataattatgtggcctttcctttctgaaacagaaattcatcctaagcagtaagttatatcttcttctgcttgtgaaataattatagcatgttacgaacccgattactaaaaacaggatcgactcgtgtgtgtgattttaagaatacctcctaaaatcaccagtaataccctaccctttatttgttaaactgtagttaccggacttttacaattaagattcaaaacattacatttttgtgaagttttaaacaagttattgatttatgacagaacttatgtgtgttaagaaaaggtaattttaacacttgttcgcttaaaaaaattaaagctcttagattttttgattagaaataattgcttcatgttctttaatatgctcaactcgccctgcatcccccgcaataagtaacaaatataatgcctcaatcattgtcatacttgccacgcgtgagaaataatactgcgattgcatcaccgtctgccgcactgctgtctttaaatgcacatcagctaatagcgcaatcggtgaatcatcgcgattggtgatcgcaatcaccggcatccctttttgtttggctaccttaatttgcttaatgattcccgctgcttcacctgaattcgaaatcaccaacaagcaatcctttttactcaggttcattgtctgcgcaattgccgtttcaatcgtgccacctgaatcaattgccaacaagccaatctgattaaacttatacactgcatcagcggccaccggataagtatcgccctccgcactaacctgcacaattctgctttcagtcaaaaaatgcagcacctgatctaatttggcttcagtcacattctccaaagtcgccttaatctcggcgactttatttttttcaatcaattccaaattagcactagcatcatcacgtgacatattttgaagtgacacactttcagttgcattctgagctagttgaatttttaaatcatgaaaacctgtcaaatctaaattatgacaaaaacgcgtcaccgaagcatcactcacctcagcttcagttgctaattttgaaattgtataatttaccacctgttcgggctgttttaagatcacttgagcaatcttctgatcactggctgacattgtcgctaatttactatagattgtatcgataattttagtcattattctcaccttttctgtgccaaaattatatcatcaatgtaattaattttcacaattttatttttaaagaaaataaatttatattttgattgacgaaaatcatttaccaaggtagtatgtatttgtaaataattttcacaggagaaaataaaatgaaaattaattcgataagtgacctcgctttaagtaaaatcaagccgaaaatgactatttctcttggcggcggaagcaatgtatttaagttatctcaagcgattgcacagcataacttagacatcacattatattctccatccgaacttactcgctttaggtgcaaagaactcggattagagcttcttccatctactgcagcgactaagatcgatattgcttttgatggttgtgacagcattgataagaattttaacgttctaaaaagtttgggtggaattcatctttttgaaaaacaggcagcacaaattgccaaacagtttatcctactcttacccagtcaaaggatacaaccgattctgaatcctaaaattccactttgtcttgaagtggcaccgccttgtgttaatcaagtacagaagtatttaagcagtttacatttaactagtaagattcgacaagatagttcagtagctgcatttgcccgtacgcctttgggcaactacttaatcgatgtttttaacgaagattggcacaatatcactgaacttaatcgtcaactttgtttacaaaatggcgtagttagttcttcactatttgaaaacttaactacttcattaattactgaaaaagacggagaaattattgaacttaagagaggtaataatcatgaaaacatttaattggggaattattggtactggctggattgcacatgatatggctgatgctttgaacaaagtcaacggcgaaatttatgttgccgcaaatccaaatgaagaagcactccgtgcctttgtccaagaaaaacatgtacagcatgctttcactaatcctgatgaaatgattaaggatcctagcattgatatcatctatattgctaccccacacactttccactacgactacatcaaaaaggccctcaatgctggcaagcacgtcttttgcgaaaaggcaattaccgtcaatgcacagcaatttgatgaagtggctcaattagctaaagagaaacacctaatcttaatggaaggttttactctttatcacatgccaatctaccaaaagatgcaagatatgattaagaccggaaaatttggcgaaattaaaatgatccaaattaattttggctcactcaaggactatgatccgcagaatcgcttctttaataaggagctcgctggtggtgcattgctggatatcggcggctacgcaactgcttttgccattagtttcatggatgaatatcctgaaagtatcaataccacggtaaaattctttgaaactggtgttgacgaagaaagcggcattattttaaaaaattcgaaaggccaaatggcagtgatgtcattatcgatgcgggccaagcagcctaagcgcggactggtttcgggcaccaaaggttatttcgaaatcaatcaatatcctcgcggcactgaagctgatattacttacacccagagtgctcatgaggaaagctatgataaggttactgccggggatgctgatcaggcgcttgaatatgaagtcactgattttcaaaagtatattgaacaaggccatgacgaaggcgaattggaaaaatcgcggatgatcgctcacattttaaccagcattagaactgcctggggcatgacttatccatttgataacgaggaataattagttggatttcaaaagggatcgatacataacatcggtcccttttatttgcacttattgcttattttctgcgacatatttttctagtcgtttcaagccttctttgatctgatccatcgacgttgcgtaagacaaacgaatatatcctgctccacctttagcaaaaaatgagcccgcaattacagcaacatgcctcttttcagccaaatcataaataaacttggtatcatcttgttccaagcctgctggaattttggcaaaaatgtagaaggcacctttaggcttaacgcattcaaagcctaacttggttaatccttcataaagcacatcacgccgcttttggaattctttcttcattggttccgcatcgttcattccattgcctagtgcttcttcagctgcatcctgcattggcgttggttccgtcgttgtgattgcttggtgaatcttagccagttgatccaaaatcggcttaggcgcagctaccacaccgattctatagccagtcattgcccaagcttttgacacgccattcattaaaacaacttgatcatgtaaagtcttttccatcgaagcatgtggctgatcataattgagctcactataaatttcatcacaaagaacaaaaaccggcttatctcgaacaacatctgctaaggcatcaagttcatcttgtgaatacatcacacctgttggattggtaggataattcatgacaagcgccttaacgcgatcaccatacttgtccaatgctgcttgcaatttatccggcgttaatttgaagtcatcgtcagaagtgtcgatttgttcaaccgttgcacccatggatagggcatccccaatataaagcggaaaaattggtgttggcaccaaaacaacgtcgcctggattaagcgccgcagtcaaaaagtcgtagatcgactccgttaccccattggtgatcaaaatttcgcttgggtcgtatttttgtccatatttttcagctaaaaaatcggctgccgccttgcgcaaacctggagtcccgttagatggcgcatagtgtgaatggttattagcaatgctggcttcagccgcttttttaatatgctctggcgtgttaaagtcaggctcaccaatcgtgaatttgacgatgtccgaaatcttgttggtgtaagctgcaaaggccaaaatctgccctggcttttgttcaaccaagccttttttcatatgttttgttaagtcgaccatagtttttcctccttatatcgaactaaatcaattcaaatataggagtctttttaatctttgtcaaaggaaatattaattttgatatctaaagtgcacattaaatccaataattaacaaagcataaatactataaatagccgtaacagtcggatacattgcctgatactttatcagcaaaagaataattaaaactatcgccaaaacaatcgttaatattctaaaacgttgaaaatatgacaaaatcggtaaagccactgtcaaaactatatcagttattaagatagtaaaatccaccggatatgatttgatataaaaaaactgaaatattggcaatgcttctaacagtaagaagatataactaataatcccacatattaaaagcaactgattaagtatctttttatagtctttcattaaatcaagaacttctcttttttcatgtaccagtgcttaaccagagtggtcaatgcaatgtacaaggtcaaaagtacaagaactacgagaacataatattctgggatcggaccgaatttcattaccttagccaagcttggaatgtaaggcattgcagtaccgatcaatcctgcaccgatcgtagcgagcattactacgcctgaagagtgctgttgtaagaagggaattgctggatcacgcaatgcttggataaccatttcctgtgtccagagtgattcgatgaaccagccactccagaagatggccataaagacagccttttgccctggagtagcagccacataacttgtgcccacagtacttggacaaatccagaagtaaagcaaggcaaacgtaatgatatcaaagattgaagatgtcggaccaaagaagaacatgaacttaggcaacttctttgtctcccacttacgtggtacttccaagtatttttcaccaactctatcaaatggaagtgacaaacaagatgtcccgtagatcaagtctagaatcaacaattgcattggcagcattggcaagaatggcaagaatgatgatgccactaagattgacaaaatattaccaaagttagatgacaaggtaatcttgatatatttcatcgtgtttgcaaagatctgacgcccaattcttacaccatgttccaaagtacgtaaactcttgtgcagcaagataatgtccgcactcttttttgcaatatcaacagccgtatcaactgagattgctacatcggccttcttcatggctggcgtatcgttgataccgtctcccatgtaagcaaccgtgtgaccattttccttcaaaatctgaataattctagcctttgactctggtgaaagctttacaaagaggctacattcttcaaccatctttttaacttcatcgtcgctcttaccagcaaaatctttttcactataaatgtacttggtgttcaagcctactcttgaagcaacactcttagttacagcagcgttatcaccagtcaaaatcttaacggtaatatcgtcttgctttaacttcttaagcacgtccttaacatcatccttaggtggatcaaggaaggccaagaagccagttaagatcaaatctttttcatcgctaacattgaattcaccggcttgagcaggattgttcttgtaagctaacaaaacaactctcaaaccatctttgttcaaatcttcaatgtgctttaaaactttttctttgtaatcatcagttaaatcgttgatgtgactgccaacttgcacacgattgcagcaagcaagcatttcttcggcagcacccttagttaccaggatacgaccatcgccgtggcgcttgaccacgacactcatgcgacggcgcttgaagtcgaatggaatttcatcaaccttagtgtagtcgtgtttaatttcattaacatctagctcatcgctagcggcatcgatgatggcttggtccatcaaatcgtgcatccccgtttggaagtacgagttcaagtaagccaagcgcaaaacctgtggattttccttcatatccaagttgtagtgccgttccaatacaaccttgttttgggtcaaagtaccggttttatcagtacaaagcacgtcggcggcaccgaagttttggatggagttcatctttttaacgatggtgccgtgcttcgacatttctagcgaacccttaaccaaattactagtaacaataactggcaacatttctggagttaaaccaacggcagtagcgatggcaaacaacaaggcgttgagccagttacctttagttaaaccgttgatgaccaaaactaaaggtgcaatgatcgcggtcattgttaacaataatttagaaatgttcttgataccaacatcgaaattagtttccttaacgtcgttgtttgaaatatccttagccaaacgaccaaagacagtttgttcaccggtggctaaaacaacgccaacacctgaacctgacacaatagttgttccttgatagattacatcaggatagtccaaatattgatccatgtctttttgatcgggcctcttagtcgcaatcttttccacaggcgttgattcaccgttcaaagaacttgatgaacagaacaagtctttagttttgagcaatctaatatctgctggcaccatgtccccagcgtggatattaataatatcgccgacaactacttgcttggtagaaatttcttcatccttttgattgcgacgaatattggtagttacagacaccatatttaagagggcttcaactgcgtcattagttttcacattctggataaaggatgttaatccagaaataatgatcatcgcaatcataatgatcacagtactcaggtccttttgatctgccggcacgaagacgtagtcggtaaacagcgacaccgtcgctagcagcaacaggaccattgtaaaaggagtgaagaatgattcaatgaagaaatgcaatttcgtgttgtgcttcttggtagcaacttcgttaagaccattcttctccaaacgctctttagcttccgccgaagacagaccgtctagcgaactatgtagcgtctttaacgcttcttcgggagtttgcctagcgatctgcttaacaaactctgtatcggctgtcttcttattaatcagcaacttgttttttgccatgttaatcacactttctgattaaacacgcaaacaaactaaaaaggagccaataccaattagtattaactccttatctaagcgatgtttcctcgtcgttcagttttgacactacgtgacgtaagcacaggctagctatctggatctcgccttatctcgacaaaaactattttactcgttggcatctctggatgtttccgggcgatagcttgtgttcacgtaggagcctcacctaacagtttatttgctttttcaattttcatttttattatatgcatattatttgacaatgcaattatctttactaaatcgttagaaattgtaaaagaatttaagaatgataaaaaacacgtgtttgcaatgaacacgtgtttttttataatttaattttgatatactattctatagacatggatatgttgcaactatttgtgtttagtagttttagcataactaaccacccctcacacattttgaaattacggcggtgagagttatgcataaacggatagtttggaggtttagtgctccgtggtagcttgggctattgcaatcagcatcgttctaggtgctttaggcaatttagctatcaatttggctatagcctatgcgataacaaaaaaagctaatcgcaaggattagctaaaccaacagttatctgaaactacgatcgaagtcaacggattgcggccgtgggcttcttttcatatacagattataacatgaattatccgaaacgaataaaaaagatcaggctcactgcctgaccttgctattgggttagctggattcgaaccagcgcatgatggtaccaaaaaccattgccttaccacttggctataacccaatcttcaaaccttttacttgattggttctatttgaatgacctctcgatcacccaacagatattagtataggggaatgaagaaaaaatatcaaggaaaaattcaaaaaaattttgattttttcacatttgctcgaaggatactgaatctttcttttatgaattataaaattaatttgtttttttacgattataacttttgtgacttcttaaccttattcattaattcaaagtcgttggtaaaaattccagctacaccaagtttaaagtacctttttgctatgcttactttatctactgtccaaattctttgcgtaactttgctaggtaaataccaatgcggatggatcgctgcaaaatgattcttagccgcaaactgttcaggaaacggcaccggccatttgtttaaaaagcaatattgttggtggggatcaattcgctggcaattttttaaggtttgataattgaaggaagagaaaataatgggatgcacaaaatgatattcttgtgctaacgccaaaacgatggcttcaatcccctcatcatgaatcttgttagtcttaaattccaagttaacatacaaatcctgtccctgaagaatttcaaataattcacttaacatcggtaccggttcaccgttagctaaacgaaatcgcctgatttcacttaaggtatagtccttaatataacctgtcccattagtagttctatctaacgtttcatcatgcattactaccggcactttatctttagttaagtgcacatcaaattcgacaccttcagcgccatgcgttgctgcatatttaaatccttgcaaagaattttccgcaaatttgaccggtaagccccggtgagcaaaaataattgtctgagtcattttttcacctacaaaaaaatgccgctctcgcggcatctgctctattttaatctaagacgattgcaccttgagttgccaaagtatcacgaactagattcttaacatctcttctaactaccataccatcggtgttctcaacgtattcaagatattgagctgacttaatatgtgcatcataagccttgtcatcaaagtaaacttcgacaaaataccattcgttttcgttcttcttattgactccagacatcataatttccatgcctggttcagcagccatgctagtcgtcatttctttcttaacttcatgcgcaaacttttctgcatcttctggtttaacttcaactttaactaagcgcattacaaaatgatctgcgttatcattcaaagcatcatgagcctttgtggtaataacttcgggctttaattcgattacttctttgtctgtggaaatcttgtcgatggtttctgcaaaatcatcagcatgtgctgctgcaatgtgcaaatcttctgccaagctattccggaacaattcgatttcgtaattgtcttcaccatgagcatcgtcatgtgcgcttccaattaacaaagttccttcttcagctggaattgagttgtgcatgttattttcaacttcacggatatattcaccgcgatcgttttccttgatatttaatttagtaattctaaaaattggtgtttcatccatttttcttgcctcgtactataatctttccacacctatcattataaactaatgcagaaaaataaaagcccctattcaccagttatttgatcaattttaaccgctttagctggccattcagtccgtacatattccaatgtactgccttcattgctagttaactgcacaaaagaacaattgggcagacctaaaaattcacgatggttagttttttcattaatgtattgcgacaaactatcgccatgaccaacaactaaaatattatcgccatcttgtgcatcccgcatgatcaagttaatcccgcgctccattcgctcaactacctcatgattatcttccacgcgaaatttgcccaaacgatgcagcggccaaagtagcacattgcgtgcctcaaaagcgccatagcttttctcttttaattcctttaatcgaacatactccatctcaggcccagcaataatctctaaagtatcacttgccctttcttggggtgagcaatatgctctagcaaaattaattccctgatcttgaaaataatcccgcacggcttccgcctgcttaatgcctaatggtgttagcgctgaatcacagcttccctgcatgcggtgtcctttattaaaccaagtttgaccatgtctgactaaatataaattaattgccatttcgtcttactttaaaccctctgctggccacacgtatgaatcaaaatggatctttttaccatcaactgttagcttcacgattgaagcattgccaaaaccgccaaagttcttattctcggtagcatcgcgcacaaacttagctaaaatatcaccatgtcctacaactaaagcagtttgaccatcctctaagccgcttaaaatctcgactaccgcacggtgcattctagcaacaacgtcttcgtctttttccatagttgggtctacgttaggattattataattccaaggcaataagaactcatcacgaccttcaaaaatgccataacatttttctcgcaggtcttttaaacgcgtataaggcatttgatgatcagtaataatttccaaagtatcgcaagcacgctcttgggttgatgaaaaagctttgtcaaaatgaataccctgctttttaaaataatcacgggccatttcaacctggcggatgcctctttcattcaatggtgaatcacaacgtccctgaactttatggtaatagttaaaataagtttgtccatggcggactaaatataaagtttttgtcatattttcctcgctaaatcgttttttcctttatcttatcaaaaaagcacgcgtcgtgcgtgctttcatattttttcgttaaattttgaagttcttgttgtattcactcgaatttacaacaaaacttggcacactaatgaagtgcattgagtaaatattgccagtcttggaaatgctaaagccataataattgtagtccccatcatgacgtgagccctgtgtattaaataaatcaccggcatgttcccattcgcggtaaaggctcttatcattacgctgattttccccagctcctgcaaagccaaagatcatttgcttcaagccaaagtaaatatttcgcttcatttcagccatagacataatcttcttattagtagaaaaaccagccatatcttcgacataattatcgtttaattctaagccatgtttcttgcaagcccgtacaattccggcaacatagtgatcgccatctttgatactcttgccattttgctcgtattcttgcgcaattgaattagctaaggactctactccagaactataaacccacggcttcaaacctaattgactacgagcactattaattaggcacaaagagaattctgccagttctttttgctcactagcagaaagatcggcaagattgatcattttttgatcggctttgctttcacctgagctaacacgtgaaaagtcgttttgctccattcctttcatgcaagcctgaataaaactagcacttggcttccccttatatgcttgcaataaactagctttcgtatagccactcggcatcttcattgtagctgttacataattctgcgttgcagcagtctttttaacgagtttggcatttttagctaataaccattgagagttatttccaatcttataagccaaatattttttcttgcccagctttaaatactttttagcagaataagaatactctcttttagctacagcataatacttagacttcttgcccttatttgtataaagtctaactttcttagttcctttaacctgaacttttcccttaactgctgcttgaaccgtttgtggtgtcgtttcgtgtattacactagccgtccccatcaggcaaacactagtcaacaaagtcacaattaatttttgcttcatagctgttccactttctgtatgttttgattattaatatttgttatttaaattatatcgtatttatttaattaaaaaaatcaaaaagagacacactatcattttgacagcatgcctcctttaagttagtttgattttatttagttttgaaaagaggtttatttttagtaccagccgtttgcttgccagaatgccttagcagcagtccatgagccataacgacctttgacatagttatcagctactcgctcttggttagctgctgaatagtcaccattcaagtatgaagctgaaagttggtatttaccaacgtattgaccatttgaagcaccgtatgagccaccagattctctaccggcaatccattccttagcactagcttctgaaccacttacagttgaagtagtagtttgagtgttggtgttatttgctgcagtagtagttgctgcagaattagtattttcagtttgagtttggtgttgtactggagcttgggttacagcagcttgagtgtggtagccgcgagttacatacttagcacgaacccattggttcttgcctaagtcataccacttgtgacctttggcatcgtaagcagtcttaattactttccatgaggtgttgcttgccaaagtttggccagtagcctctggattcttgtagctgttgtaaacagtgattgcgttgtctgaaacgttcttaactgttacaacagctgtatcgttttctacaatagcagcttgagcagtattagtgttgttattagctgctactaaacctgtaactgataaagcagttactgcaattgacttaactaagatagatttaattttcaaaaaaattctctccttaaaattttaaaagtcataagtaacgaattttcaccttattcgtccgtcccattcaattgacacagcatatactaccttgcttaaattgcagaactataacaggaatatcacctgcagattaagaaactattgcaaagtatgtcaaaattgtaacaattgtaatatttatgtaaatttattcagatgatacaaaaccgcatcagatcgccatttaactcgatttttaatttttatttgctatgtgcaaaagcttgttcgcatttaatatattgaaacacttttgcaaaacgaagtgtctgggaaaaaactagcttccagatgaataaaaacgatcaagatttccttttttaagaatcttgatcgtttttttgttctctttaaaatttttaacaataaaaatcggcccttcagccaccttctttgacaatatttgttcaaattcatcatcataaaggcaattccgatatcggtttcgaccttctctttacctcgcaggtgcgttctgcgcatgccaaatacgttcttcaaatgtccgaaaactggctctacatcatattttctcatgccatagatgtgtctgccttcttcgctttggagaacttcttttgctttttcttttaaatattgccagttaggattatagcgaacttggcgctggcggccgctagctgttttagccaattgttccaattctggcgttagctggaactcgtctgcctcataaaccttaaaatcacggacctgaccagtagaacgatccttgcgctggctgtaatatttgaaattgaatctgacgccatgatgatcaatgtaataatcatctttttcattgtagtaccagttgattagcttagttggatcattcttatactttttggtctgttctttttcatacatagtgtagggaataaagtacttcttgtctggatatttttcctccagcatcgaataattgtattcactgccatagccagcatcggcgacgattttgtcaaacttgtccaacacggtcatttgatccaaaaccggctccaaagttttgaaatctgtcggattaggaaagatggcataatcaactacatattgatcggtcgtgactgcttgaatattgtagccaggctttaattgaccatttttcatgtggtcttccttcatatgcataaaggtggcgtcatgatctgttttggaataactgttgcgtccggcaaagatctcttcggcttcttcatatttttgcattcttggcacataatcttttcttagccggtgcagaatcttttttagtccacgtcgcttggcttttcgaggtgaaccgccaggaatggctttgttttcctgctcaatctctttagtcagcttgttaatttctgcttcagtttcttgagctaattcctttagcccctgactagtttgaactttttctttttccatttctttgactacttctttagtaatcaattcatcataaagttcaactgcctggcctttcagcttttcatgatacttttcaaccgctttgcgccagacaaatgtatagcggttagcatcagcttcaatcttagtaccatcgataaaagcagcaccttcattgattaagccttcatcttctaacaggttagtgaagtagataaagctctttttaatcagttcattggcatggctgcttgatctaaaattattgatagtatgatatgaaatcttttgctggtcagccaagatcatcattggcagattttcttccagcatcaactcaatctttctgccagaaaaaactcttctggagtaagcaaaaagcagtattttgagcatcatggctggatgataggctgggcggcccgttttagcagtcttgcctactaaaacatcttctggaattgaatctacaaaccagctgatgacattagccaaatgattggccggaatggcaaaatctagattaagtgttaaagcagtttgacctgtgatataattcttgtacatgttagtttccaccttttttattttgtgatgatttaataatatcaaggctggagctaaaagtatacaaaaagagcgttgaaacaaaaattcaacgttcttttttcatgatctgagacttagttttttcccagacacttaattctcacaaattttttattaatttattccattattctgccttatcctcttctataagttgacgtttattaagtgccgcaataaatggcaggtaaatcaaaatgtctaagataatattgattacttgcaaaattgagcccgcaatactgcctgttgccaaaaaaactgaaataattggcggcattgtccaaggaattacagtcccattacataatagaactaagcctaggttcattgcacaataagtggtaatcgcatttaacattggcgcaatcataaatggaataattaacaacaagttcattacaactggcagaccaaacatagttggttcattaatattgaacaagccaggtacgatggtcagtggtgctaaaactttattttgtttacttgcgcgcttgcgccatactaaatatccaatgcaaagcactaacccaatagtggcacctccatcacccatgtaaacaaagttatcgataaatggttgcgtaacgatatgaccaccatgagctaaatctaagttacctgcttgattcaatacacggttagcatcggtttgcatcaaccagattggttgcatagcagtattaactacgttaccaacatgaataccaacgaactagaacaagctcaataaaataattgaaactaatgtaccaattaaggtatcgcctaatgcacctagtggcttagccaaaatattcatgattacatcgtgaatattgccccatccaatccaagcaaaaagccagtaaacacagccagcaatagcaattacagcggcacctggaattaaagctgaaaagctcttagctacagcaggtggcacagtagctggcattttaatttggatattatgattaataaaccattggaaaatccatgcacttaggagaccaaagataatagctacaaataatcctctactacctaagtaagtgtaagggaagccttcaactggaactttatctccactcataatacttggcgtcaaaatgaagaatacagctgcagaaacaattccggcagaaacaccatctgtcttatattgattagcataactccaagcaattccaaaagctgcaattaagaccatgatcccaaaggagccattagtaatcttggctaaaatctgtgccaggcttataccatgaacagcagtttttgatagccaatcagaccaaccggcaactggaaatgaattaatgatcctacaataattaacggtatagccatggcgataccgtcacgaacagcaattaaaggtttaaaactgcctattttagcggctacaggcataatgtgtttgttaacaaacgcattcaaacctccgctcgatttactattagccataataattccctcttcaatctaaaaatgatctcgtgtttctttggtatatacctttcgcaatataacaatatcctgaaagcgattttattaccactattttaaaagataattttttgcttatatttttaaccaaagtttgattaacaaaatattgcagttatggctgtaagtgctatagtttacatgtaatcataaaaaaagcgaggaaataaaattatggctaaatacgaagtaaagttaagcgaagaagatttacaaatgatcaaagattgtcattcaaagaacccttcaatcatgaaggctatgaacgaagccaagaaagtcgaagattaagcaaattttgatctctaaatcgaaaaaaggcgtccgcaagggatgccttttttattggttttcaaatcttgtaccgtggggatgcttccagttataaacacggactattttacccatgccatctagcactacaacatttccatcattatgtggataaatcaatggatcagaatgtgaaccaccgtcagtaaaaattcttgctggctcacctgggtattgcactgttctaactatacaatcatcaattgatagccgcctcatttgtcgaccatcatcatattttccttctaaagcagctgttggcgtatgaccagtcacaattgttttgcccgttttgttatgagccatcattttcaataaggaatcggaataccaatacttatctcgtgcccaaatacggtaaaaatcatagtcaaatttcaagccatactctatctcagagtaagtttccggatcattatactgttcatctggccgcacacccgcatgaacaaaaatcaagtgtggcgtttcatacataataggacagccttttagaaagcgataatactcactatcacgcaactcatcaggcaaaactgtactgccaaacagactaactaggctcttgccaccaccgttataaacccaaatgccatcttgatgttcctgcttctccgcaaaattgagtaacatttgctcatgattacccagtagtacgattgctccttcgcttttttgctcaattaaataatccaatacttccttcacatgctcgcggccatcaacatagtcaccgcccgcaactaattgtgcttctggaaaatctgctgttgcctgcttgattaagtctaaggtttctaagttgccatgaatatcagaaatgaagatatagttctccttcactcgatcatccaacagcgttcgattgataatttttttcatttcatactaccccatgtgctaaattaaactaacatttttttcttaattatagcagatgtacactggttctttttctatgcaatcctaaaattaacctccggcaaaaaaaaggctacaatagatatgaaaagaagtgattgcaatgtttaatgaagaaaatgcaattgatgccaaggacttacacgttgattctttcaaatatcaatcaactgaagacatgccatctgatgcttattctagctgggaagaaaaacacccaaacgccagggtattcaagcttgaatttcgcaacatcggcgaaagcaatgaatggcaggaaatgatcattatctacactgaataaataaaaagtggaagaactccaagcctagtgtgtttcttccacctttttacttattttgattttctttttccttcaatttgtgcagaatccgttcattttctttagtacgtttttcaactgctgcatcgatgatcgaatcaaaccaatgattatcagaatcatcgcttgtttgatccttcttttgaggaccttcattttttacacgtttgtcagtttcttcattaataatggaatccagccaatcaaaattatctggatcatggctcttatcagtcatttatttttcctccatttttgatttaaattaatttatttactattctttttgactataattgagttaacaagatgaaacaagaaagaagtgttcgaaatgaaaattacattcactgacaaggcgcttgactacttaaaaagacgcgaaatcttgaataaaattctaattttaatcgccgacgatggtggtggtaaatattctatcaaaggcggcggttgtgcaattggcagtcacttttccattatttatgtagacaaagttgatcctgattatccaatcaagcttgaaaacgaccaaggaatcaatatttacacttctaaatacgacaccacaatgatgggaccaaatttagtggttgactacgccaatgcatccctcaacttaaagagtgacgaaggattgcttgatggcggcgttgatatcggcaatggcgccgagttaattaaagctcaaaagaatgtaaaaatgaccggcgttgaatggcgttgctagattaagatgatcagaaaagacagtagtttgaaatcaactactgtcttttttctatagaaattgaccactattaggatcgaatccagtacgatctgccgcggtaatctttctaattaccttacatggattccccgctgcaattacattatctgggatgtcattcacaactacactgcctgcaccaataattgaattacgtccaataattgtatctggagttacgctaacccctgcacctagccagacattgtcaccaatgccgatcgaatgtgcaacacaaccaccggcttttcgctcggctggatcaaataaatggttgctggtatacaagccaaccttaggaccaaacaaaacattgtttccaatataaacaggcgcgccatctaaaatcgtgcaatcatagttggcataaaagttatccccaacatgaatattttgtccaaattcacaacgaaaattagggttcacgaagggatgctcacctgttgaaccaaagagttctttgattaatatttcttttttagcgtgatcattctcattattaatattattggtcttcaaggtagcaaggtctctcaaggtgccaaggcgaggatccgcatcattataaggacgaccagtagccatgtaattaaattttgttctaagcgacatgattctttcctttcattagttcttctatttttattatagaaaagaaaaagcgctttcgcatgtttgacgcataatatttagcacactagccctaatcttattgcttattctataatggtaaaaaagaaaggattaaagccatgaaaaacttcaacaaatttaccgctaaatttgctcgccttttacagaatctactagtagtcgcaattggtttactcgggattattctgatcatactcttattccgcgatctaattccactttgccaatcattattttcaactaagatcgaagaaagcaactccgagattatgtcagaaattatcgttttcttactcttctttgaatttactgcaatgattatttcagccttgcgtcatcacggtcacactagcatcaattttctattgggcttaggtgttactgcgctaattcgcagtctgattacttctcatagtaacatttggagtacgcttgccacttctgcttcaattttagtactagtaatcgcaatggttattttcaataaaaatctgcgtaatatgtaaaaaaactgtatcactctaggctaatgtcattggagtgatacagttttttgttttactaattaactttgcgccatgaactcattaagttgtttcttagaaaaaacattgccatatttgcatactacgtttcctttcattattgaacgtaattcacacaaccaaaaaagcatcatttattaacaatattgaaaataaataatgctttttagtaatactctgatgctgaatgccagagtcgaactggcgaccttctctttacgagggagatgctctaccaactgagctaattcagcaaactcacaacacatgaattataccaaatgtcgctaattggcgcaacgacctttttctaagctagcattcaaaaaagaacattatttccaatctaagcacaatccttgcttgtgcaattcttctggcaattgatcacgatcagtttcatgcagatcaagttttttacctgtaatctgcttagtgaatgaatcaatgcgacggttagaatcacgtaagtcataatatgtcgtaactatatcatcatagtctttaaggtctttcacatcaaagtctttcttataactaccttcaaaacaagtgaacttaagtggtaatcgtggttttaattgtggcttttgatctggcataccgacttgcatccccaacactggaaaagtcaactcaggcaaatcaagcgtcttaagcaaatccaacggatgatcgttaaccgtaccaagtggcacatagcctaagcccatactttctaccgcattagcgacattttgaaaagcaagcagcgtatcttctattgcttggaaaaagatatcagttgtgtgaacacggccgtcgtctttgtcaagttgctttctaatttgttggttacggtacaagtcaacgataaaaataaacaaatcgccttctgcaccaacatatttttggttacataacttttgaattttcttcttttcttcaggatcggtaacgtgcagtaagctagcattttgcataaacatgctggttggagtttgaccaaagacagaatacaaagtttccagttgttctttagtcaaagtttgatccttaaattttctaatagaacggtgatttaattgcgtgtcgattgtttcgttatgtatcattttcatccttcttactaataatcagtaagttcattataacaaataatatggctacttttcttcaaattcaattccgtaatctgcttgctctccgtgctcagctaaatcaagccccattaattcatcttcttttgatactctaattggaataatccttttaagtaataaaacgattatcgtcgtcatgatccctacaaatatgatagtaaataaagttcctaaaatctgagctgtaatcaaatgcaacccgccaccataaagcaagccattttcaatttgcgggttaacaatcttagtcgcaaataatcctgtcaaaatcgaacctacaattcctgaaacgccgtgacagccaaatacatcaagtggatcatctagcttcaattttggcttaatcacatgaatgaagccgtaactggctagtgtacaaataaaaccaatggcaaaggctcctgccacagtaacatagccagctgctggcgtaataccgactaatccacacaaggcacccgtacagaggccaatcatagtagtcttttctttaataaacatatccaaaaacatccaaaccacaaatgacgtaccagttgcaacagttgtagttaaaaacgcttgtgtagctacatcgcttacagttaaggcagaaccaacgttgaagccataccaaccgatccataatatactggttcccattaaaacccatggtaagttataatgcttaacctcaccatttggatcaaaatcaattcttggaccaacaaaaattgataaaaacaaggcggtaataccggcggtaatatgaactacagtcccacctgcaaaatcaagcatccccgttttggctagaattccatctggtgtccaaaccatatgaaccattgggtaataaatcaagatcgaccaaattgcgacaaatgcaagtaaaaatttaaatttcattcttccgaccaccgcaccaacaaacaacgccggcgtaataatcgagaacatcatctgaaacattaaataggtcaaaattgtgatgcctgaatccttggaataaagcgtctttaaatcaaagccgtttaaaaagacacttttactcaaaccaaatattccaccaacatccttacccaaagccaagttataaccaaaagcaataaacaaaacgattgcgacacctgtaatcatgaatactgaaatcatcgtattcacagcattcttctttgaaaccatgccaccatagaaaaaagcaagtccaggtgtcataaagaaaactaaaacactagcgacaaaaacaaatagagtgttcgtttgattaatcatctttttttctcctcaaagtaaaatagttagtcctaatattttaaattggtatatacactatttcattgatgttgcagcatatatgcttaattaaaaaatattggtttgataaaatttaattctcattatacactcatttttcttcttgtcattaattttctataaaaaataaaggtgcatagacgtatggcttctatgcacctttgcatatatttgcttttaattatttgttttcgttttcaagattgttgattgcagtttcaaccaatgcatatgcttgttgagcttggttcttagcttgaacatattcgttcaagttgtcatcaccattagtaagcacacgtgcaaatgaaatttgttcagccatcaagaagttgaacaatgaatcccacttcttgtcttcaaacttgatttccttagcagaaattctaggcatcatttcacgtgtggtattaaatgccttttccaaaatttgttcatctgcatcggttaattcacgcacattgtatgcttggtggatttggtgaacctttaaaagttcttttaataaagttcttgcttgtgcatcttttgaaactgattggttaatttttaaagccatttttacctactcttttcttttttattaacaattataccaaattgtcttcgaccatttgcttaacgcagcgtttcatttctttaatatcaagaatactgtaggcaaattcttttctaagtagttcctttggcaaatattgatcgtacttgtcgattcctggcacttcgtttggataaaccagatcaagcggatcaaagtctttatcagcttcttcgcctaaaatgcgccagaagtcatgctcatcagcatccatggcaaaatacatgaagtatggtctagatgaattaaagccacggatatttaactttttaccgcacttaattcgaattaatcgctctagtgccaaaaatgcataagtcccagtccatggaaaaagacaccacatattaccgcccagcttgatcaaattattctttggcagaccagctaaagcggcggtgtctctagcttgcgtcaagcgagctttaccattttgcatcaaatatggatacatcatcttttctgcaagtacctttttcattctctgtaaaattttaggttgaatatctccaggtacatctccaaagtaggcaggaattctaccctttacttcatggcaatatacttgatgacgcttgatatccacgtcttcgacaacccatacacgtccagcaatcgcaatcttgtctcctacaggaggtggcttaacgatcgtacctaattcttcgctgccagcgtgaacactgaattcctcgttttcttggaaaactgcgtaaaatttaaagttattcacaactcgttcaccagcaagaccaacgatcagaccaccatcttcagtccactcaatgtgacctgttttaagcaagtgtttgagcaaaacgcgataatcgtcttggctcacgttgtggaaatatgacaaagttaacacccgtgaagcaagttcagctggcgtcatttcaccgcttgaagccagcgtactcatcgtctgatgatagagcaaactatatggcaaacggttaggttcaggtggctccacccatttttcttccgcatacagttgtaccaaggcaatcccttgaagtagcggccacggaatcagttctggcaacatcgctcttgattcagggtgttcttcgcgcatgacaaagtgcatctctgatggattaccgcggcgccctgtccggcccattctttgtaaaaagccagacacagtaaatggcgcgtcaatctgaaaagcagattctagtttgccaatatcaattccaagttccagcgtagctgttgcacaagtcgtcatgtagacatcgtcatctttcattgcggcttctgcagtttcacgcaaggcttgagacaaattaccatggtgaataatgaagcggtctggctcatgattataggcacaatatgctctgagctcctgacaaacagcttcacattcttcacgactattggtaaaaacaagacactttttaccacgagtatgctcaaaaatatagccaattcctgggtcagctaattctggtgccttatcagttttcggttcgatttggctcggatcaaagtccctggaacttgcttgtggatttgttttataaaaatgttccatagataaatgccaaatctgtggttcattttgtacccttggtgtaacagtttttctgtttgaaccagcacccaaaaacttgctggcatcttctaaattaccaatagtagccgaaaggcctattctccgtggatttacattagctagttttgataaacgctcaattaaacaaaatgtttgtccaccacgatcacttctaagaaatgaatgaagttcatcaaccacaatatattttagaccaccaaaaagatgcggaatatccatgtgcttattgatcataaagctttcaagcgattccggcgtaatctgcaaaatacctgaaggatgcttgagtaacttgcgcttttgtgtttgagctacatccccatgccagcgccaaactggaatatccacatctgtgcataagtctatcagacgatcgtattggtcgttgatcaaagccttaagtggcgcaatatacagaacttttactgaatcttctggctcattataaatttccgacaagatcgggaaaaaggctgcttcagttttgcctgacgcagtcgaagccgacaatagcacattatgatcggtgttaaaaatttcttcggccgccgcaacctgaattggtcttaaacttttccagccatgttcatagatataatcttgaataaatggcgcataatgtgaaaaaacgtccatagtccatttccttaaatcttaaattcggtataatccttttccgcattatccgaaacagcctctgacttggtatagctgaattgatccgagttaagcagatcagtgatctttctatcaggattctgccaaacaatgtcgagcagctcaataaagtcacgaataatttcacgtggcgtgatattggtatccgctccaacacgggcatattcaatcttaataaattgagccaaatcatcatcagtaatcgtgcgctcataaccgtacaaattggcatgcatgtcagctagtttttcagtcaaaaccaacatttcttcagcggttaatggttcaagcttaattactggcgcatacatatcacgtgctccttcttgagcgaatttgcctgaagcaagtcggctgcgtaaagcttcgtatgaataaactccgcgacgacggtctttaactgcttgtggcgtaccacacataataatgcctaagtaccttgctttgccctgcaaggtatcgttgtacatggtcaaaatcttttcatagttgtactggcggctaattgcattcggaattttatagatattaaccaattcatcaatcataatcattaaaccagcatagcccgcttgtctaaagaaagtcgcaaataactttaaatattcataccaatcactatcactaataatgatatcaacgcctaattcctttttagcctcagtcttatggctatattctcctctgaaccacttgactactttagccttagtctcatcatcaccactcatataagcgtgatagtacatgttcagcaatttagcaaaatcaaatccatgaactaattcgtttaatgaagaaatgacgccatagattttctggtcaactgcttgctcaaatttaggatcatcattatttaagcctgtttcttgcgaaacttgcatctgcactgaattaatccagcgatctagaatcaaaatcaaggcaccgccttcaggcctagtcttagttgataagttctgaattaattcacggtatgttgctaaaccctgtccttttgatccttgcagccgacgttcaggtgataaatcaccatctacaacaacaaaatttttatccatcacatagttacggatcgtttgaagtaaaaagctttttcctgagccataacgacccacgataaaacgaaagcttgctccgccttcttgaataacatccacatcgtgtaatagggcctcaatctcggcctttctccccacggtaatataaggtaaccctattcttggcactaccccaccctttaatgaattaaggacagtttgcgcaattctttttggtactcttcttttttgtggcatgatttcatcccttcaaaaacatatcttttaagtcatctacataatcggtaattacttgtggttggtcctgttcgttattttctaaaaccacatcaccgaattcatcaaataatttttcattaatattatccatcaaaattgatgccattaaatggtgctgcttcaaataggtctgccaaggctgctgcatcagcaatgcagttaagaaaaacatttcattttcatctaagccatattcattatcaactttgacagtttcatctgcttgtttttctacttcttcttgcgcttctgcctgctctagctgcttttcctcatccgttaacaaactatcacgcgtcttcgaagcattggcccgaatttgatccaaatcggagaaatcaatcttaatctgatcaatctgcgcctttttttcttgaatgtgatattcagcaatccccgcgtcaattgccttaagtacagcttgatcaataaatcgcggcttaatcgaccgacctagtttaaattctgttcgcgccactctatctaattcatggagaaaattatttaaattaacccgctgacggctgatttgttgatcacaatgaatttgccattttccttggtaaaaatgatactttcttactgcatcaatctgatggtcagctacttgttgttgtcgcagataaaaaacactgcctacaaagattggcttttcaattatatcaggcttgcccacaaacgcactgtaatacgcaatgccgtattttttagcatccagcagctccagccacacgtaacgcaacagttgaacaaataacttttcattcttatacgcgtggtgctagttaaatcgttttagttaataaaaaagtccaatcttgttagactcgacttgtaaatagtaataatagaaaagagtctgatctgattgaactgccttaagcttaagcgttttagccaccatttacaagttagttttaaagatttagtgataatttgtcggcactggtatcgtttgtatgcaccggctgagtttactcatcggcgaaatattgatcaaattaaaactacggacagtctgattttggctttacttatctggcaagctaagacaggaattgaatcacaaagaagattctgtgaatgtttcaattgtttatcacactcacgttttaatcggcgttcacgtcagctattgcaattgatttatcagatacggcaagaaatgaataaaaaggttgacctgaatggacagttcttgatcattgacagctttccggtacctgtttgccaaccaattcgaaactatcgtgctaaaatttttcgcggttatgccaacattggttataaggccaccaagaaaatttacttctatggtttcaaagttcatgccattgttagcgatgacggttacattcttgattatgtcgtaacaaaggcatcagttcatgatgccagggagacagttgaactgatagaaaatacccatccatctaattactatcttcttggcgacgaaggctatttaggcaaagaactgcatcaacagctaaaacaaatgggttacgaactttggacaccatatcgtaaaaatatgacaggagctaaaaagcacaatgatcatcaattgatggctattcgcagaacaattgaaagcgacttttcgcttctgacctattacaatgccgagaacaatcgagcacgtagtctgataggctttcaaagccggttggaaattgcaattttagcttataatttggcttattgtctagaacgatttaactagcaccacgcgtattcttattaataactttagatgaattccaataagtcgttttctttgcaaagactgctgctaactcttgcgcagtaaatttttctggatggtgtaaaacctcataatcatgatcacgcttaatctcagatgcaaagcgctgcttaataatcttttcgtctaaatcataataaagaacataatctttgagccagtcttgtaaatatacatcaatactaatgtcaaattgtcgcacatatttttcttcaaattctaacagcttttcatatccatcttgtgcgtcatcaacaccaatattgttcagtaattcataaatataaacaaaggcataggatgtactcgttttttcaaaaacatgctggcgaatcttgctgcgccaagtaaagtaacttctaagctgcccagtattcatatcatgataagttggataaaaacgcttaaaggcaaaaaattcaggataatcatcatcatagtcggccatcatcctagcctgttgataaaaattcttagctcggccacgactgggcaaaatactgtagtcataaacttctagcatctttctaattctatctggaaccagactattgttatgcttcttgcgaagattttcacttggtttaattgcttgggcttgatagcggtcatctactttatctggtgcaatataaaaatattgattctgggcgatatttacttcatcaccattcatcgccagtttaaaagcaaaatcaagtgcttttttgagtgaatcttcactaactttttctaatattgccccaacccaatctgccgccttgatcttcattggatcagtgaagccaggcaaatctcttattagtgcagccattgcaccacatttcaggtccaatatactctgaccttgcccacgtgataatatcgcaaaataaccactatcaactggtgacattaaaacgtaaacgctagtggaacctggtacagcaggcttaaatttcaaaccatatttggcatagacatatttgaagagttgatttgaatccattttgtctcctttttttcgcacgtacgttcattatatcatcgatttattttttaccaaagtcacgcatgtcagctcctcatgtacatttttaagtttcataaattttatatttttatatttgtgtggttattaacaaacaattatgttactatagtttatgtaagttattgaaagcgcttttataaaagcttcctagagaggacaaaaacttaatatgagtacaaaagaacgttattctcaagatgaattaagaaaagataatccaatgtttagccgcactcgtgccactattgaaagtgcattttacggcaacaatgtccacgaagtaaccagtgttgcagaagcttataacttagctaagaagcaatcaggcgttattgttactgacttgccaatcttacacactaaggaattaggtttgccacatggcgcaacccaattggtttacaaccacggcaagattttaggtagaactgctagcgcccgtcactttgttgacaatcctaatgaagatgctgaagcattggacggcaacctacgtgaagatatttacaaggggcatgaacaaaagtacttaaaggctactgttttagtaggtcttgacccatcattcactgttaaggctcacattatgatgccagaagatcaagccttcaaccttctttcatacatcctcaacttccacttcttcgacgatgaagctgaaaaattatacgaaaagtcaaagttctacgatgaaccagacatttacttctacttcgatccaaatgttcaagacgaagattaccctaagggcttaggcgtgtttgacgctccacataactgtgccgctgtatttaaccttcgctacttcggtgaattgaagaagggtaccttaaccttagcttgggctatcgctcaccgtcacggctacactgcttgtcacggtggtgaaaagtcattccactttgacgataaagacgacaagacctttgcattctacggcttatcaggttcaggtaagtcaactttgactcacgaaatgtacgatggtaaatatgacatcactgttttacacgatgatgccttcattatttcacgtgaagacggttcttcagtagccttagagccttcatactttgacaagactcacgactacccagctggccaccacgagactaaatactacaccactattatgaactgtgatgtaactttagacaaagacggcaagaaagtcatcgtaactgaagacttacgtaacaacaacggtcgtgttatcaagacccgctacactagtcctcaccgtgtagactttgaaaagtcaccaattactgcattgttctggattatgaaggacggttcattacctccaatcatcaagatcgatgacccagtattggcaactactatgggttgtactttagcaaccaagcgtacttcagctgaaaacttacctaagggctttgacatgaatactttggttattgaaccattcgcagacccattcagagcttacccagtttcaggtgactacagagacttcaaggaattgttcactaagcgtggtgctagttgctacagcttgaacaccgacgcatttatgggtaaagacattcctaaggaagttactaagaagttaattgaagacttagctaacggcaatatcaaagacagtgacttcaagccatttggtaacttcaagggtgtatcatacttacctattgaaggctacgaagttcaccttgaagacccagaataccaaaagaccttgaaggatagaatgcaagatcgtttgaactggctcaacaagtacgatgaagaacacccagaaactccaattcaagatgaagctaagaagaccttggaagctatcatcaaggaattgagctaatattaaggaaatgaattagtgtctcattcaattaaaatttaatttcttaatgacgaaaagacgagagttgaaattcagctcccgtcttttttattgctcaatgtaattttgcttctgtagtttggcatctatcagtttataaacttgcactttattctcttgtgcaagttgtggattatagttatgtgctatttcaatgacaatagccggcaattggtagattatcttatgaatggcatcactatttttagggtctaaacttgaacaaatctcatcaagcaaatatatcttcttagaacgaattagacctctaactaaagcaagtcgttgtgcctgaccacctgataaattgttcgcgtcatctgaaattaatttatctaaaaaatcattgccaaactcatgaatcagtcccatcttttttgcttcatgaagcattagatcatcaggtatgttttgcagaagtgatagattctccctcactgtaccttggaataaccagattctttgcgagatcttgatgaaatcggcaggattaatttgatgaccagcaaaggtgatttcaccgttatacttcagattattagcaatacaattaattaatgtacttttcccaatgcctgaagccccagtaacaatgatcttgtcatgatcacgcaaagttaaatttataccatctaaaattttcttatcaccatatgaaaaagacaaatcttttattttcaaaatagcttgagagtcatgattatcttgtttaacactttcactttcttcaaaattatagctttttatttttctaattgcatcggtgctatgaatttgagtctgatacaaagcaattgttcttagatatcccacaaccctatcagctgacaaacttaaagttataatggccgctaccgttacgttaaaccagcctctctgcataaaaagcaagccaataaaaattggtagcaatagtgtaactaaagagattaaccatgcaatgaattgtacctggaattgacaattattcatcttacgatatttgtcttcctcattaaccaagattcgatcaaatcgtttaaagaaaagatgtctgacaccaaaattcagtatttctaagcgtccttcaaatatatccttcattgcctgaatcaactgtgagttagatttattccatttttcggttttctcattcatcctcttcttgccaatatagcttggaatcagggttagcgctgaaagaagcaaataaataattcccaaaatcagattagtttctacaacaactattgccgatgcaaccacattaaatacaaactgaactatgtcagttatcccaaagaaatatttttgttcaatttctttagcagtaccactaatcgaattgattacatctgctcctcttgcttgcttcatgtctgaattagcaaatttagaataaaaatattcttgctttaaagcaatatttaatagcatcacaattctattttgaaccaaataaaacaagagcatggctatgtagactatcagatatgcgccaaaggctaagccaataaatttataaacgtggtcaatgttactaaaattgatattagttaattgtccaaacagtacagcatttaataccccttcaaatgctgaaatggccgataaaaccagaaaaactatttgtaaatatattggaacatgttttactacccatttaaaatttatttgttgtgtgttcattgtttaatacccacatatttctcataatcaacaagccaatcttcatcatttttataagaatgattcatacactttttaaacccaattgctttaaatcatcttcatctttagtttctaacaattgtcgctcttctagagacaagtgatacttattcactaaggcatcaatattctccaaagaaatatttttaccatcagaaagatcctttcttcataccttcagacattactatacctcctattttctctcgttaagtaatgcataattttcaacttgcaatttactgtgtatgggattgatatcaatgcttcccataattccccaaatgcttataataataacagtaagtattctcttattttttaatttcaaagccaggaattcattatgtacggtcaaaaatttaaagcacttcgtcttcaacaacatatttcactagagcaagctgctaacagagttatctctccatcgactttatccagatgggagaataataagattgatattcgcttcaatttagttattaagcttttagacaatattcatataaacctaaaagagtttactaattactgcaaaattaatcatagtaatccatttgttgcgaaagtggctatgtactatgaagccaacgatgatcgtcatattttgcaattaatacaaagcaagaaaaaagaataccaaaattcacataatcaatttgatttacttctactagctatcgcatgtaattgttattacgatctaactgataacaatgttttcccagtgagctatcaaaagaaattattctacattttatctaacattgaatattggacagagatgtacatcaatgtttttggtaacactgtttttctctatgacagcaaggaactatatagtatttcaatcagaattcttaaaaatttaaattctaatacatttaatgattttcaagaatattattatgctttatcctctgtcatcaacgccctaaccgctctaattatcaaaaatcccaaattagcatcacagcttttaactaaaatagagaaagtttcaattcctaaaccaatctcttacttaaaaattagaactaatgtcctcaagtatcttttagattaccgtttaggcaaaacagatgaaaagcttatctcaattaagctagaaaatttaaagtggttaggattaacagatattgcaaaagacttaactttcttctttaaccgtataaaaaatgatcgttcacctctttcctaattcatttgcctattatattaccctcatttttatctaattgatttttctttgcaaatatgcaaaattatttttagcaagaataaaaaagcctattaaatctaggtgtttacaaaccctgatttaataggtcttttatgcgtcttttttattgctcaatgtaattttgcgccttagttaaaatatccatcttctcatgttcagttaaatacttttgtgcttctgccaaattgacccatttactagctaaaatttcttctttttgaatgttaacctcttgtcctgcaacatagctagcaacaaaataaactactgtcttagctttatcaacagtcaactgatattctgttttttctctaaaagtaaagtcaaaattcggctttaaaccaacttcttcaaaaacttctcttctagcagcttcctcagctgtctcattattttctaaatggccttttggaaagccccaattatgatttacgacgctctgcacgatcaaatatttcagctcgccgcttctacgttctctgtaaataactgcacctgcagaatgttccatcttcatttttgtcacccaacctttatattgcataattattaaatatttattaacgtatgtcaagcaattgtaatcaaaaaaatgaccagatctttgacgatctagtcactttattcgcagacgaaattattaagttctattggtagaatattttaagttacttcttcaagttcttttcgcagtattccttgaccttgtcatcatcggccttaagaatccattcaactgcagcctcagtcttcatggtgtctcgaccatttacttccatttcgtggtcccaaatagcgtcacgaataggcatttcattacccttagcccagtcaaaaacttgatccatatttctatcaattaatgcagtttcttcaatttcttttgcatctgccataattaaaagcttcctttctgataacgactttattgtagttctattagctacaactgttaacaaaaagggacttttttatttaaattctaatttttgccattaactgcttcatcagccttattcactacactaaccgcattaagtgaacgaggataaccaatgaatggtacgttttgttcaatgaccttcatcaagaattccttgtcattgcctaatttgatatttgcttgagcatgggccatcaattgaggttcacagccaccttgagctgcaatataacagaaggtaatcatttcacagtcattgtcatccaagccttttctagtgtagtaatcgccaaagcaattatcaactaaccacttattgattgttcccttcttggcaaaacccttcatttgtggaccaaacaagcgcatttgagtttcctcacccttttcaaggcgattgtctagtgtagtagttgcttgacccgcaagaggtaattcaacgccgcgcttagttaaaacatcattagtaatcttgaaaaatggggaaactctacccaaacctaaataatcaaccgcttgatataaacttccttagcttcaactgggttaacaccattgtctagtacgactggaagcattatttcatattcttccttgccttgcatccccaacaaataagctaaagttgacaacatcttagtccggtcgggcaaatcaacgtctttttgcacttcgtcaaaagcaaaatgattaattctttccaaagcttctggatcagtagccttcaataagttggcatgtactctttatgcatcttctttaattgacataataaattcctttctaaacgcttatctctactatttatttaagtacgattgagtctaaaagaaaaatatctattttttattctgcaatataacttattcttatcaaaaaaatatcctaaaggctttttgccttcaggatatttctattaggttatttaattagtttttcttgtctgcttcagcatcatggtatgacttaacgatttcatcaactaattctggatcatctttcaaatcagtagtttctacaatgacatccttcaagtcttcatctttaagcatttgcatcaacttaacgctttccttgtcgttaggttcatcaaagtgataaattctaccaacagtttccatcaatgcactgtagtccaaacctctgtccttcaattcacggattggacggataaatctttcattgtagcctaacttacggattggagttctaccaacacgagcaatatcatctgaaatatatgggttttggaatctgctcaaaatcttgttgtggtattcttccaaactttcttcggtgaattccttgttccacttgtggtaaagaagtgaacgggtttcactcaagacacgcttaacttgctttaaaacaaatggatccttaatagcatccccaatagtgtcatagccaaggctcttgccagtataagcaacagttgcgtgtcccgtgttaactgagaataactttctttcgatgtaaggttcaaggtctggtgcatagtcaacgccctttaacttgatatccttgttcttcatttggctttcgtcaataacccattccttgaagtcctcaactgagacaaacaatggatcgtcattatgttggataggaacaattctgtctacagctgcgttagggaagccaatgtacttgtctagttcaggcttaacgtcatcgtccaagtgcttataaacttcttcttttaagtgttctgaaccgccaatcatgttttcacaagcaatcacatcaagtggagtagtgttgcctgattgaattctagcagttaatcctttggcaattaatggagcaatgattgccaaaatctttggaccaatggcggtagttatcatatcggttgatttaattgcttcaactaccttgtctggatccttagcattgttaattccatcaacatttgaaacatgaattctcttcttaccaggtgcggctaattcaatgtcatattcaccacgcttgtttaattcatcaataatagtttcattaacatcaacgaagtcaatgccaaaaccattatctgctaaagtttcaccaataaatccacgaccaatattacctgcgccaaaatgtactgctctcatgtttaatctcctacgttctttaataaatcaataatttcttctggtgtttgtgcgtctgcaagctttgcaacgttggaaacatcactacagaaaatagcaatctgtgacaaaatatttaagtgttcattgttcaaaccagcaatcccaaagacaacggttaccaattgctcggtatcatccttagggtcactaaaatcaacgcccattggaatttggactaccgaaattccagtttttttaatgtgcttcttaccttcgtcagttccgtgagggatggcgatgaaattacccatataagtcgacacatcttcattacgggcaagcattgaatcaatatactctggttcgacacagccgccatcaactaataattgaccggccattctaattgcttgatcccgcgttggtacgtcttgattaagtttgatcatttttggatctaattgtaatgccatttagctcatccctttctaattcaacttttgaatagcttcgccaagctttttatctttaagtaaatcatcaacaactagggtttgaatatcactgtatctgacagccaagttcttattagcagctggagtaacaattactaagtgacttggatcatcagtcaattcgttgattcttactgccttaacaggagtagtcttaccagccttcttaattgcgtcattgaataaactagttgccatagtagcggtacctaagtgttgatcgtgacggatgaagtccacttctttaactttactgaagtcgattccttcaagtgaaccaaccttcttaactggtttttcagcctttggcttatcttctacttgagttaaagctttgaagctagctacgattgtgtcatatttcggactactcaagaagttgccaaccgccacgtgcattgcatgtggagtcttttgtaaagcgcggtcagctaattcttcttgcgtgatgatcaacaaaccatcttcatctttcaagtttctaacagcggtattggttactgaaaccttaatgccagccttcttgaatttatcacgcaaaagtgaagcacccatagcagatgaacccatacctgcgtcacaagcaaagataattttcttaacattggcatatgacttaactgattcatgtgcatcttcagcttccggcattgattgacctttagattgggccttcatggcttgcatttgggcttgttttgcttctaactcatcaccagtactcttgtcgtttttaagaataattgcggcaataatgaatgaaacaactgcggcgccaagaacaccaacaatattaccgaaataagcatcctttgcggaaacaagcaagatagctaaaattgaaccaggtgaagcagctgcttttaatccaccaccaagagtagtgaataagaaagtaccagtaacaccaccaccaatagcggctaaaatcaatgatggtttcattaatacatatgggaagtaaatttcatgaaccccaccaaagaattcaatgatggcagcaccaggagctgagctctttgacttacccttgccaaataaagtaaaggcaagcaagattccaagtcctggacctgggtttgattccattaagaacaaaactgacttaccaacttgtgcagcttgttggatacctaatggaactaagatcccgttaccaatagcgttgttcaagaacaaaactttggcaggttcaataatgatgttggctaatggtagtaagtgaactctaataattgcatttactcctgcactagcccattgactgccaacttccataatcggtccaatgataaagaaggcgaaaatcgcagcgatcatgcctagaataccaagtgaaaagttattgtagatcatttcaaaaccagatttaatcttgtcctggaatacttgatctagtttcttcaataaccatgcactaagcggacccataatcatggcacctaagaacattggttgatcagtaccaacaattacacctaatgtaccgattgcaccagcaatggcaccacgttcttcataaaccatgcgaccacctgtataaccaattaacagtggcaacaggtaatgaagcattggttgaactaagttattaatttctttgttagggaaccaaccgtgtggatacataaagaatgcagcggtaagtccccaagcgataatggcaccgatattcggcatgatcataccggataaagctgtaccaaatttttgaaccttcactttaacagaagatttactttttgcttgagccattttcttcttcctctctcatcaacttacatttttattctaagtcaatcagtaagcgcttacaatgaaatgaaaatagaactctggcacacttttgtgccagagtctgagtttacctattctattaagcttttgaactattggttacctagtaaccgatctttgaggtcttgtaaaaaaagtgccgcaattgcttctttaatttctttttgactgccatttgtaaataaatctaagttttgactagacatgataatcatgctggaaatagtactcattacccgctgttcgggtgcagtaagattgtctggtgccagcatcaaaagaactcttttgacttgaatggtatcatgatccattgattggagcgagatttcattatctaagtcaaacatggtaaatgaacagcgtgtaatttctggactacgtgtgtgtagcaatgcgatatggctgttagggatgccaactggtgccattcgtacacgtttgagaagatttttggcaacgggcatttgcttacgaattagtgttgaatccgaatgggctaaacattcctgaattactgcaattaagtcttgcgaattgtattccagttgttgaatcttgattccgttgactagctccgagcaaaataatgtactaatcgatagcttagcaagttgttcgactgaatggggatgtttttcttcaactacctgtttagctggaactggttgaggatatttttgttcataatcttttaagtaagcgcggatttttattaattcatcatcaagcagtaatggactaacaagtaaataatctcttgagaagcccttcaatctcaaggttgaaaaaataagattgtaatttgacaagtctatttgatttaaggcagaaacacggctggttttgacttctttgatttcagaaaattctctttttagtttggcacctaagattgccgacgttccaatgccattttcacaaattactagggccgataaattacgctgctgattgcgactcgtgtattcattggcaaaataaagcaagatcaactgcaactctgacgctgtcaaataattttctggaaacgctaaatgccaatatttttgaatagctagatataaatcaggaaacttttgactaaggcctgccagaatttcaataggtgtatctggtaaaagagctactttatgttgtactaaaccaataacgtgtttcgtcactttagtcataaaactatgatctttttgaaaatcccaatgcatttcttcagaaacgtgttgaacgaattcttttactttgactgagattgctaattcgcgctcattataagtcaagtaagtgttgtgataatcacatgataataacttattagctaagtatgagacatcattttggtcaacctcaacttgccgcttttgcgcaaacaaggccataaaacggtaaacataaccctgatatttaagtgaatcagcactggggtggataaaatctagcttgcatcccgccagagttctttttatcgttaccgcaaaagttaaaattaactcaatcagcttttggtcactgtctagcttaattttaccaaacacgctttttttaagacaatcagcaacctctactagcaaagccttatcaatcattgtcaaaaacatgtctttgcttgtcgtttcattatgcagatacttaaaaaagttatattcattgatctgattgagcataatatcaactaaaacctgacgccgtattttttcaggcgcctgaattaacagtcccacaccctttttgcggatcaagtcaatatgatatcgttttagcgacctttcaaccgtattcaaatcactttgaatcgttgcttcactgacattcaggtcaagcgcaaattgaataattttacatggctccgtacttaaaagcaacttagctgcaattatcttctctcttttagctaccgaaattacattttgactgtgagattgttgcacagattgcttaatttcttgtaattgctttgaatcgccagataaaaaatattttcctttttgattttcaattttaaagtcgttcttctttaaatcgccaaattcgcgataaaccgtccggcggctgatctttagactctcttcaatttgtttgatacttaccccactcggatttcccaacaaaatttgaagaatgtgcttttgccgttgtgttaaaaacatcccatcatcctcgcttacgtttaagtttattatacttgaacgcaaaaaaagaagacagatctcaaatctgccttcttgaggatatttatttacatattaattattcaacagtaacactcttagcaaggttacgtggcttgtcaacatccaaacccttatcctttgaagcgtagtaggcaagaagttgagttggaactactgtcaaaagtgctgacatgtagtaattaatttctggcaacacgatcgtgtcatcactatttgcgaattccttgcctacaatagtaattactgaagcaccacgtgaagcaacttcttgaatattaccacgagtaagatctgcagtaactggatcgttaatcaaggcaataactggagtgccatcttcgatcaaggaaatggtaccgtgcttaagttcagctgcagcaaagccttcagtttgaatgtatgaaacttccttcaacttcaaagcaccttcaagtgcaacagcgtgatcaataccacgaccaatgtagaatgcgtttcttgattttacaatatattgatcagctaattccttaagcttttctttaccgtcaacaatttgttggataccttcagcagcgatggctaaatcatgttgtaagtcccaatccttagcatcttgattaccaagtttttcaccaagtgccttagctaaaatagcttgtaaggcaacttgtgcagtgtaagccttagttgaagcaacggcaatttcaggacctgcacctaaaagcattgtgtagttagcttcacgtgataaagttgagccttcaacgttagtcatagtcaaacttggaataccacgcttgttagcttccttcaataccacgcgtgagtcagcagtttcacctgattgagtcaagaaaataaagaatgggtgcttgctcatcattgggaagtggtaaccagcttctgaagcgtaaccaacttcggtaggaataccagtgtagtgttcaaaaatagttttaccaactaaacctgcatgataactagtacctgcagcaaagatataaaggcgatcagccttagaaatagcatcaataatatcttgatctacctttggttcaccattttcgtcaaggtagttttgtgacatgtgacgcattacgcctggttgttcatcgatttcttttaacatgtagaattcgtaagtaccctttgaagctgcgttagggtcgatgttcaaaacgtgaggttcacggtctacctttttgccatcaacagtttcaatagtgtaagaatccttggtaatgtcaccaacatcaccatcttgcaagtcaacaaaagtcttagtttggtcaagaacagaaatagcatctgaagcaatgatgttaaagccatcaccgattcccagcatcattggtgacttgttcttagcaataaatacgtggtctggttctgtgttgtcaacaagcaagaaagcatatgaacccttaaccaacttcaaagcttccttaaatgctgaaaaagcgtctaagttcttatcacgtgcaattttaccgatcaattgaacaactacttcagtatcagtatctgagtggaacttaaccccttgcaagtacttttcctttaattctgtgtagttttcaatcacaccattgtgaactagatagaaacgcttggtttcatcaaaatgagggtgagcgttatctacagttggcttaccgtgggttgcccaacgagtatgaccaataccaactaaaccttgttcatctggagtcaacttttccttcaagttagaaatacgaccaacagccttagttaagtattcgttaccatttaaatcatttaagtaaatgccagctgaatcgtaaccacgatattccaagttggttaatccatttaaaataatatctcttgcaggcttacctacaactccgacaattccacacataattttctcctttggtctagtttgctttgaagtaatggactagcttatttttattgttacagtaggtataatagtctttttgcaaaaatcggtcaagtacaaatattcaaaattggtattataattttaagcataaaaaatggctaccagaatttgctccgatagccatttttacttaagtcaattttaacttttattacttgtttttgatacccttaccttcatagcagtctctcatcaattgagaaatttgactaattaatggagctgatgggttagtaacagtgttttggtcgccataagcttcaacagctaattggtccaccttcttgtcaaactcagccttatcaacgccataatccttgaaggccatcttaataccaactgattcagccaaatcaataattttctgaactaatttttcaattaattcagcatcacttgaaccagttaagccgattgctctagcaatttcagcatagtcgctttcagcacggtaaactgagtaatgtggccacatagcaagtttttctggacgcttagcattaaagcgaatgacttgtggcaaagcaattgcgtcactgacgccacttggaatatcaaaagttgaacctacggtatgagcaattgagtgttccaagccaaggaaggcatttgaataagccattccagcaatcgtagctgcatcatgcattctctttctagcatcaagatcgccatcgtaagacttcttcaagttagcgaaaattgctttaatagcttcaagtgaccaaccacgagtgaagtcagttgccatggttgaaacataactttcaattgcgtgacctaatgcttcaaaacctgaccaagcaattaaacgtttgggcagcgtttgcacaaattgatcatcaacaattgaaacatcaggtgttaaagcatagtcacataaggtatgtttaattccagttttggcatcggaaataatagcaattggggaaacttctgaaccggtacctgaagtagttggaatacatacaagttggacaccattaatctttgggaaacggactactctttttctaatgtctaagaatttttggtaagcctcttcaaaactcatttctgggttttcgtagaataagcgcattgctttagcagcgtccattactgaaccaccaccgatagcaattacaacgtctggcttgaagatgttcattctgtgaacaccatccttgatcacatcagtattaggatcaagagttacagccttaaagacttcatattctttttgacctaaacgcttagaaatgatatcagtaacttcatcagcaaagccttggtcagctacaccttcatcagttacgatgaagaaacggttaacgtttggcatgtgacgaaggtagttagcagcgttatgttcgaagtaagtctttgatggtacctttacccattgcatgttatcacggcgtctagccactgttttgatgtttaacaagtccttagcaccaatgttgtgtgagaaggtattggcaccatatgaaccagtacccaaggtaagtgatggcaacatattgttgtaaaggtcaccgataccaccgagtgcagctggtgagttgactaagatacggcaagcatccatcttcatggcaaattcatcaataatcttcttgtcatttgagtgaagaccagcggtgtgacctcgaccaccatagttcaataaatcggtacaaatcttaaatgcatcgtcatggttcttagcacggtacaaagtgaagactggtgaaagcttttcagctgatagtgggaagtttctacctacgcctttatattcagcgataattactttagttgtctttggcacatccacaccacaaagcttggcaatttcataagctgacttaccagctactggaccagcaaccgtaccacgacgaggatcaataaagtgttcctcaaacttcttaatttctcctttgtttaagaagtagcagttccacttcttaaattcttctttaactttgtcataaatttcagtatcaacgacaactgaattttcagaagcacaaaccataccgttatcaaagttctttgataaaacaatgtcataaactgcacggtcaatattagcagtcttttcaatgtaagaaggaccattaccaggaccaacaccaatagctggcttgcctgatgaataagcagctttaaccatacctggaccaccagttgccaaaatagtttgaacacctgggttagtcatcaaatcggtcgttgcatcaaggcttggttcttcaatccattgaacggcatccgcaggagcacctgcagcaacagcagccgcacgaatgattttaccagtttctacacaacatttttgagcctgtgggtggaaaccaaagataatggtatttctcgtcttcaaagcaagcattgccttgaaaataacagttgaagttgggttagttactggagtaacacctgcaataacacctttaggttcagcaatcttagtcaaacctaattccttgtcttcttcaatatacgccgacggtcttttcgtgacgcaaactgttccagatattttctgaagcatacatattcttggtagttttatcttcaactacaccacgtttagtttcttcaacagccattttagctagtgggtaagcattttgttcacctgcagtagcaactgcttcacagatcttatcaacttgttcttgtgtgaagttagccatttgatctaaagcgacatgtgatttctttactaagttatcgaccatgtcgtagatttgctttttcttttcgtcctctgtaagagtctctttttgttgtgtcttagccattgtattattacctctaagatctactaattcttgtgaactaatttacaatgtcaactatagcacaataactttatttgtaaatgcatgaatttatgaaaatagtgaattaacaaagattcacatttcctcataatttcgctctaatgcaaatgaaagctattccttaattatttgtttgtgaattaacaaacttatttttaaaaaacagatttttgatatttttttaaatctaactatagagtctggtcatactaattgataatgataaaatattaagtatatgtgaaaagattgagaacattggggggcttatatgagtgagaaaaaaacacagaccgcttctggttataaacgaaccctaagcaatgcacacattcagttaattgctttaggtggaacaattgggaccggcctttttctgggggttggagacagtattcaccgcgccggtcctagcgttatcctgatatatattattgtcggtatcttcctcttcctgctaatgcgggcactgggagaactaattatgtccgacttgaacaagcacacatatattgattttattgaacaatatttgggtaaaaatattggctttatcacaggctatttgtattggttaagttggattaccttgggtatggccgaaaccacggccctaggaatttacttcaagtattggtttccaacactgaaaccttggattccaggaattattaccattgtgatcttgctgttaatcaatttaatttcagctcgtgtctttggcaacttggaattcagttttgccattatcaaaattgtcacgattattgccttcgtcatcttgatcctttacttactagtaactggtggcaaaaccagctttggtcctgttagctttgctaaccttgacgatcatggcggcttcttcgcccgtggcagtaaaggattcttacaaggatttcaaatggtaatcttcagctttattggagttgaattaattggtttaaccgcggctgaagcacaaaagccagagacaacgttgaagcgagcaatcaatcaattaccaattcgaattattttgttctatgtcatggctattttaggaattttgttagtaattccatggtccaaagttgctactaacgctagtccatttgttgaggccttaggtgctactggtattaaaaatgctagttctattattaattttgtagttatttcagccgccgtctcatcaactaacagttttttgtatagtgctggtcgattacttttctctgttacttttgacggtaaaggaaaatggaataaaacttttggacatttatcaagaaggcagcttccacaaaatgcattgactttatccgcattattgatgggatgtgcaccactaatcaccttggttattggcgatcaggcctttaattttatctcatcaacttcaactagtatgtttttaatcatctggagtttgatgattttaactcacatggcttacaggagaaaaacagcagctaatcagctaaacgattttcaaatgccaggttacccttatatcgattatgtaatcttgtcattcttcgttttaatgattatcctgctattgattttaccaagctaccgagtaccaatggtcgctgcaattgcaatctttattgttttatacatcatttccaaaatttggagtaatgaaaaagctgtttaaagcaaaaagtcgagttttttagctcgaccttttattttgcaatttttttaattattttagcaggatttccggcaactaccgtattagctggcacatctttggttacaacggcattagccgctacaacggcgtttttacctaccgtaacgccaggcaatatcgttgctttagcgccaatccaggcgttttgtttgataacaactggctttaattccagttcttttctatgctgtggatccagcttgtgattaactgaaatcaggtaggctccaggcccaatcaacacatcgttctcaattgtaatcccgcctaagtcgaccatcatcacattggcattaataaacacgcgctcgcctaatttgatgttgtgcccataatcagaataaaatggtaaccgaatctctatactagcagctattttttgaccaattatttcactaatcaattgtctaacttcacagctacaatgccgttgtgtatttaaattctgcaataatcgctgattctgttgggctagttttcgacgtaaatcgtgatcttctgtttccattattaccactcctttttcttgctctacttcagtttaaagggtaagcttatcaatgtgcaaagcttataaggtatgaagtataataacaattgtttataggtgatttaaatggaattacgtgttttaaattattttgtcgctacagcgcaagaattaaatatgacgcgagctgcacaaaaactattagtctcacaacctgctttatcgcgtcagatagcagatttagaggatgaattaggcgttaagttattcaaccgccagccgcggcacttaaccttaactcctgcaggacagtatttatatgaacaagcaaaagaaattcttactttagcttccaaaaccaagagtaacctacaatctagtgctgtcatcagtggtgacctaactattgctgccggcgaaagttttgccatgcaacgtctaatgaatatcgtcagcaacattattcgggattatcctacagttaaaattcatattctaagtggcgattatgaatttgcagaaaggcgtttagatacaggtgcagttgattttgccgtaatcattggtaatctacctttagataattatgcttctctgcagctccctgagaaggatacatggggcgttttaatgactaaggatgatcctctagcaaaaaagagtgctattacagctgaagatttagttggacgaaacgtcttaaattcacaacaagccgaaaatcgaaagtactttgattcatggttcggtaattataaagagcaaattaatatcatcggtactgttaacttgaatttcaacggtacacttttagttaaaaataaagcagctattatgctcacactcgataagctagccaatatatcagatgaatccaatctaacttttagaccaattactccaatgttaaaacagccggtaacagtaatttggaagcgagaaaccaataaatcacctgtagctgatttattcctaaatcgtttacgagcatcaattgatgacgattaacaaaaataacctagatcgaattgatctaggttattttttactttatttctttttacgactaaaacgttgcttcaatcgttgccataagcttaatgccctgcgcatatgatcagctggtacatattttcttattgctcgcaatacctttttggaatcacgtgccgcaaaaacaaatttaccatttgacttagttctgatttcaaaacgcggaatataacgtccaccaaagcggacatctgcaaccacataagttacttcattccaaggaatctgaacataatcttcaacgtttcgttcgttataaaattcaaaagctctatcgccgatcatgattttgccgtatgatgcaattcctctaaaccaggttgcatcaacagtgagatcgacttttgtattaattgacttagccatttattaaagaatgccccatacgtggaagagaacaccgacaacgaagataccgatgataatccagattggtgaaactttcttcttcaataaccacatacagaagaaagttaagagcaaaccagctaaaccaggaattaattggttcaagttgtcttgtaaagtagtaactttagtactgcttaaagctttaccgttacccatatcccattgttgaagagcggattggatacctttagcacctgatggaagcttgtcccattcgatgtaaccacccttttgaataggagtttgagaaacaattggagtgaacttgatgtttacccaacgttcaattaaggcacccaagacgaacatacccatcattgaagcaccacgggtaaccttttgaagcataccacctgacatatcactggtgatagctgaaccagccttgtaaccaaattcttgtgtgtaccataagaatgcgattctgataatattccagataacgaagaacaagataggacccattacgttacctgcaatggccattgatgcacctaatgcaccaacaattggacgaacagtgtaccagaatacagggtcaccaacaccggccaaaggtcccatcataccaaccttaacaccttggatagcgtcatcagtaacttctgcaccgttagccttatcttcttccaaagccaaggtaacaccaagaacaggtgatgctaagtatgggtgagtgttaaaaaatactaagtgtctttgtaaggcagcagataaatctttcttgtttgggtataactttctcaatgctggaatcattgaataagcgtaaccaccgttttgcattctttcatagttccatgaaccctgaaggaattgtgagtgccacataacgttaaaacggtcgcgcttggttaatttagttttcttatcagccattatataaatcctcctctatgcgttcattttaatagtcatcaatgatatcgccgagtggatcgccagtgccggcatcgccagaattattgtttccaccgttgccacccttagcttcaagagctaagtacatcaaagccattgaaaggccaatagcaccaagggcgatcaaagttaagtctttgatagcagcaagggcaaaaccaattgcgaagaatggccatacttccttacttgccatcatgttaataaccatagcgtaacctacggctacaaccatcgcaccaccgatagtcataccttcgtttaaccattgtggcatcattgcaagccaacttctaacagtacctgaagggattgctaaaagaagtgcagctgggatagcaattctcaaaccttgtaaacatacggcaatccattgccataagttgatcatacgccagttacccttcttagcttctgcgtccatgatgtgaacgatagcagttgaaatagtacgtacgatcatagttaagaacaaaccagcaacagctaatgggatagcgataccagtagcagtaccaatacccttaataccttgaccaccttcgatcaagataatagctgaagctactgatgctaaggcagcatctggtgcaacagcggcaccaatgttagcccaacctaaagcgatcatttgtaatgaaccacctaaggcaacacctaaatccaagtgaccggttactaaaccgatcaaagtacaagcaactaatggttggtggaattgccattcatccaagataccttccataccggcaagaaaggcaacaaacacaaccaaaatcatttgaatagcgttcatttatttactcctaattatttattactttttttcgtcaagtaaagtttgagccttcttcaagatagcatccatattacctggagcatctgaaggaacttttcttacatcaaacttaacgcccatcttttcaagttcacggaatgtatcaacgtctttttgattcattgataatacgttgttggcgttaacatcgccttccttatatgacattgaaccaacgttgatattcttaagatcaataccgcctttgatagccctcaatacatcttctggattttcaaacaaaagaagtgcatgagtgtttccaaatcttggatctttagcaatttcttgcatcttcttgagtggaacagtatgagccttaacacctgctggtgcagcttcacgaatcatactcttacgtaaatcatccttagctacactatctgaaacaacaattactctatcaggcttcatagctggaatccaaccagttgccacttgaccgtgaagcaaacgtgaatcaattcttgccaaaacgtacttgatatgaccatcaccaataacagtaccttctggaatgctcttcttactgcccttagcagcagctttgtcagctactggagctgcagcagccgtcttaggcattaagtcagctggcttagtcttaattccatctctaccaggttgaacaactgcagtggcgatgtgctttgcagttgcattagcatccatcattctctcagtcaatgcttgtacaaccattggtaaattcataccagcaacaattgcccatttatcatgcttttcagcaagtccatttgcttggttaaatggagtaccaccccataagtcaaccaagaacaaaacttcatcttggttatcaaatgaagcaattgctttttccattttgccacgaatgtcatctggaccttcatcaggctttaagataacatgtgcaaaattatcttgttcaccgaaaagcatttgtgcagattgtgcaataccatcggcaaagccaccatggctggctaaaacaattcctaccatgtaatttcctcctctagatcaaaaaatgaatccgcttttattatacgataaatatagactttaaaaaagtgttttttgaaaataatttcataaagtgccaatttgtttcaagcagtccaaatgccttgtctcccaagcaaagacagaaattagtctaataaaaaaagaaagcctgttttcatgatttgagtcgtttttcacaaatttggcttcctattaaaatatatgctggttggataatttcattttcataaaataacaaaaaaggaagccttccgcttccttctcccctttactccggctgtcagactcgaactgacgacatcttgattaacagtcaagcgctctaccaactgagctaagccggaatattaaaaaagagcacggcagcttcctttcctcgcaggcagttgcccaccaactactttcggcgttaagaagcttaacttctgtgttcggcatgggaacaggtgtatccttcttgctttcgccaccgtactcttttgagcttttacactcaaaactaaacataatccttctcgcaaaaaaccttccagtttgcttcgctttggtcaagtcctcgactgattagtactggtccgctccatccttcacaggacttccactcccagcctatctacctcatcgtctctgaggtgtcttactgcttacgcaaaggaaatctcatcttgaggggggcttcgcacttagatgctttcagcgcttatcccttccgcacatagctacccagcgatgctcctggcggaacaactggtacaccagcggtgcgtccatcccggtcctctcgtactaaggacagctcctctcaaatttcctacgcccacgacggatagggaccgaactgtctcacgacgttctgaacccagctcgcgtgccgctttaatgggcgaacagcccaacccttgggaccgacttcagccccaggatgcgacgagccgacatcgaggtgccaaacctccccgtcgatgtgaactcttgggggagataagcctgttatccccagggtagcttttatccgttgagtgatggcccttccatacggtaccaccagatcactaagtcctagtttcctacctgctcgagttgtctctctcgcagtcaagctcccttatacctttacactctgcgaatgatttccaaccattctgagggaacctttgagcgcctccgttacactttaggaggcgaccgccccagtcaaactgcccacctgacactgtccctggcctggcttacaggtcgaggttagagcatccttcaaacaagggtagtatcccaacattgcctccaataagactagcgtcctatcttctctggctcctacctatcctgtacatgtttaaaagatactcaatatcaagctacagtgaagctccatggggtctttccgtcctgtcgcgggtaacccgcatcttcacgggtattataatttcaccgagtctctcgttgagacagtgcccaaatcattacacctttcgtgcaggtcggaacttacccgacaaggaatttcgctaccttaggaccgttatagttacggccgccgtttactggggcttcaattcaaaccttcgcttacgctaagctctcctcttaaccttccagcaccgggcaggtgtcagcctctatacgtcatcttacgattttgcagagacctgtgtttttgataaacagttgtttgggcctattcactgcggctaaccaatctcttggctagcaccccttcttccgaagttacggggtcattttgccgagttccttaacgagagttctctcgctcaccttagtgttctccactcgactacctgtgtcggtttgcggtacgggtatgtcatctctggctagaagcttttcttggcagtgtgattaccacaccttcgctacttttaattcactcctcttcacaactcgtgttgctggttagaagcatttgactcttaaccgcacttgttgcttgaacatcgttccatcgcgatgcgtgcttcacctcctgcgtccctccttcgctcttaacgatttgacacagtacaggaatctctacctgttatccatcgactacgcctctcggccttgccttaggtcccgacttaccctgggcggacgagcctgccccaggaaaccttagtctttcggcggataggattctcacctatctttcgctactcataccggcattctcacttctaagcgctccattgatcctctcgattcaacttctccgctcttagaacgctctcctaccacgtgctctttaaaacacatccacagtttcggtactatgcttagccccggtaaattttcggcgcagcgccactcgactagtgagctattacgcactctttgaatgatggctgcttctgagccaacgtcctagttgtctacgcaactccacatccttttccacttagcatagatttggggaccttaactggtgatctgggctgtttccctttcgactacggatcttatcactcgcagtctgactcccgtgtatggatatctggaattcgtagtttatctggattcagtaacccctgacgggcccctagtccaaacagagctctacctccattatcctctccacgaggctagccctaaagctatttcggagagaaccagctatctccaagttcgtttggaatttcaccgctacccacaactcatccccgcaatttttaacttacgtgggttcggccctccagtgcgttttaccacaccttcagcctggtcatgggtaggtcacttggtttcgggtctacgtcacctaacttttcgccctattaagactcgctttcgctccggctccgtcttttctgacttaacctcgctagataacgtaactcgccggttcattctacaaaaggcacgccattgcactttaatgtgctttgactacttgtagacacacggtttcaggttctttttcactccccttccggggttcttttcacctttccctcacggtactggttcactatcggtcactaactagtatttagccttgcgagatggtcctcgcggtttcaaccgggattcctcgtgtcccggcctactcaggattctgctaggcgtgcttgagatttcgcttacggggctctcaccctctctggcttaccttcccagataattcaactatctcttacactgccacgtcgcagtcctacaaccccaaatgataaatcacttggtttgggctctttcctcttcgctcgccgctactaaggaaatcgatctttctttctcttcctgcagctacttagatgtttcagttcactgcgtcttcctttgattagctatctattcactaatcaataatgcatctctgcattgggttcccccattcggatatctccggatcactgcgtacttaccgctccccgaagcttttcgtagttcgtcacgtccttcttcggctgttagtgcctaggcattcaccgtgcgcccttttctacttgaccttactcaagaattctcttctcggtcgctctacaatctgttctctttgattgtctcggttttttgcttggattatattcagttttcaatgtactagctctttttgaggtactaccctcaaaactaaacaaagtttctcagtgtgcttccgcttgctctggatacttctcttagcattcctgctctccatatccttcgcttccttagaaaggaggtgatccagccgcaggttctcctacggctaccttgttacgacttcaccccagtcatctgccctgccttagacggctccttcccgaaggttaggccaccggctttgggcattgcagactcccatggtgtgacgggcggtgtgtacaaggcccgggaacgtattcaccgcggcgtgctgatccgcgattactagcgattccagcttcgtgcagtcgagttgcagactgcagtccgaactgagaacagctttcagagattcgcttgccttcgcaggctcgcttctcgttgtactgcccattgtagcacgtgtgtagcccaggtcataaggggcatgatgacttgacgtcatccccaccttcctccggtttgtcaccggcagtctcattagagtgcccaacttaatgctggcaactaataacaagggttgcgctcgttgcgggacttaacccaacatctcacgacacgagctgacgacagccatgcaccacctgtcttagcgtccccgaagggaactttgtatctctacaaatggcactagatgtcaagacctggtaaggttcttcgcgttgcttcgaattaaaccacatgctccaccgcttgtgcgggcccccgtcaattcctttgagtttcaaccttgcggtcgtactccccaggcggagtgcttaatgcgttagctgcagcactgagaggcggaaacctcccaacacttagcactcatcgtttacggcatggactaccagggtatctaatcctgttcgctacccatgctttcgagcctcagcgtcagttgcagaccagagagccgccttcgccactggtgttcttccatatatctacgcattccaccgctacacatggagttccactctcctcttctgcactcaagaaaaacagtttccgatgcagttcctcggttaagccgagggctttcacatcagacttattcttccgcctgcgctcgctttacgcccaataaatccggacaacgcttgccacctacgtattaccgcggctgctggcacgtagttagccgtgactttctggttgattaccgtcaaataaaggccagttactacctctatccttcttcaccaacaacagagctttacgatccgaaaaccttcttcactcacgcggcgttgctccatcagacttgcgtccattgtggaagattccctactgctgcctcccgtaggagtttgggccgtgtctcagtcccaatgtggccgatcagtctctcaactcggctatgcatcatcgccttggtaagcctttaccttaccaactagctaatgcaccgcggggccatcccatagcgacagcttacgccgccttttaaaagctgatcatgcgatctgctttcttatccggtattagcacctgtttccaagtggtatcccagactatggggcaggttccccacgtgttactcacccatccgccgctcgctttcctaacgtcattaccgaagtaaatctgttagttccgctcgctcgacttgcatgtattaggcacgccgccagcgttcgtcctgagccaggatcaaactctcattttaaaaagtttgaatgattgctcattccttatttaagatctttgtctcaaatttattgctcgcgaattgacttcgcttcttgtttgggtttttacacccgcacacttttagcgaaactttgttcagttttcaaagtactacctctgtcttgcttttttgcaaagcagacagctttcatattttatcaaaccatcatttctttgtcaagaacttttttgatttgttttttcgtcttactcaagctttttctgctttcacctgacgacatttaaatatattaccagcttatttacttctttgcaagtactttttttctttttatttgttttctttccttgcatgtctgtttttaagctctcgtcgcatctctcgaagcgactttattaatttaccttattttctccgctttggcaagtcttgctcttcgttcgcaatcttttagaaacgcttggacgcgctgtaattatttctttatttctatttcaatctacctttttctttttgcttactttatttttatccttacgcttattattcgagttttactgttttttctcttaattttagtacaaaatttttcgaaattttttcaaaataattcaaaaaacagtgttttgcctaatttttcactcaaaaatgcaaaaaaagacgtttatcaaattgatatagtcctactttagtagacagtacaaatatataaaattgtactatctatgaaagcaggactttttgtatgtctagaaaaagtaaatttagctatgaagctaagcttaaagcagttaaacaatacataagtggcgaagcatcacctgcttcaattgcgaaagttttaggggctggcaagactacactgcgccaatgggtatatgcatttaaagatcatgggccagaagcattaagaccacataaatataatcaaagatacagtaaagattttaaactcaaatgcatagctgcctatttaaatggcgaaggctcatatgattatctaacaaataagtttggtttgcgaagtgctgcacagttaaagcagtgggttatcaagtataatagtcatcaagaactcaaggactacaatcctattctggaggcttatatgactaagagaaaaaagacaaccctagaagaacgtaaacagatagtgaaatactgcaaggatcatcaatggaactacaaggaagcagctcttaaatttggctgcagctatgcccaagtatacaactggtcaaaaaaatacagcgcaaagggaactgacggcttagcagataggcgcggtcatcgtttaaaagaagctgagctatctgaaactcaaaggctaaagcgtgaaattgaacagcttaaaaaagaaaatgatattaaagaccaagagatagccttcctaaaaaaagtgaaggaattagaaaggatgtgtttgctggacagccaaaacaaagacaaatagcacttaaacaacagcagcgaaattctctttacagtttgatcaaagaatgtcaccgagaatataagtggtcaattgaatggatgtgcaaacaagccaatattgcccggtcagcctactacaaatggcttaatcataagccaagcaaacgtgaactaagagatcaaaagattcttaagcgtattaaagaaatagctgagagcaataacagcctctttggttctcctaagatgactttggctttaaacaatgagctagcagacggtgaggccaaaatataccgtagaactgtggctcgcttgatgtgcgtgaatggcatctatactagcaaggccagatttaataagaggtatcgctatcaagctgctagaccggaagaaactgccgaaaatctattgcatagagacttcaatgccactaaacccaatgaaaaatggtgcactgacattactgaagaaaaaattcctggaacaagtcaaaagatttatctctgtactatctttgatctatatgatcgtttccctgttggctatgctttaagcaagcgcaatgatacagccctagttaacgctgctctgtcaactgcttggaaaagagagcccaatagtcatgcaatgcttcatagtgatcgaggatttcaatttaccaggatgccttttaagcatgagctagaagaacatggcatgccacaatcaatgtctagaattggccgctgtattgataatggcccaatggaaggctggcaaggtttaattaaagaaatgcgagaagttctttatccgaaggcaaatagctatgaagagatggaaaaagcctttaaagcaagtattgaatactatacgcgtggtgctagttaaatcgttctagacaatatgtcatattataagctaaaatagctatttctagccgttgttgaaaacctactaagctcctggctcgattattctcagcattgtaatagctaagcaaagaaaagtcgctttcgattgttcttctaattgccattaactgatgatcattatgctttttagcacccctcatgtttttacgatatggtgtccaaagcacgtatcccatacgctttagcttggctgctaagtcttttcctaaatagccttcatctcctaaaagataatggttaattggatgagcattgatcatcaattctaccgtctcttttgcatcatgtaccgacgccttagtaactgcgtagtcaagcagatagccatcatcactcactattgcgtggactttgaagccataatagtagatttttttcgtcgctttataaccaatatcggctatgccacggaagatcttaacgtgataattgcgaacaggctgacaaactggaatcggaaaactgtcgataatcaataattctccacctacctttacttcctgattccaaccctgacggatacaacgaattagaggcaagagcattcgagctcgacggttaaaacgagaatgagataagccaacgaagaatttacagaatcttcgttgagattcaattccaatttcagtttgccaaatgagcatcgctaagatagaactatcaggaagcttggtctgatcaacatttttacgatgtttaagtccatcaggcgcataaagcttatacagcgagcgacaaatcacatttaaccgattaaaactaacttgtaaatggtgagaaaaacgattaagcttgagatagttcaattagatcagactcttttctatttaaattacttacaacttgagtctagtctaattggacttttttattaactaaaacgatttaactagcaccacgcgtaatactatattaattatgatcctcaggagcgcttcaatggcaagagcgcaggtcaggttagaaaagaagctaagaataatccagagaatataatttcatatccaataaaacaagataaaagatataaagacttttggaaaaagattgatgaaaagaaaaatcagctcgcacaatagcgaactgattaatcaaattaatttatatatttaagctgtctacttgacacggtacggatcaaatataatcattcgataaacgtctcattttatatctttagatgatcaatctttagtgtctattcatcttttttcttacgtttttcaacgccaagtaaactaatccaacctaaaccagcgagtaatgtaccaatcaaacctagtgtgtgtttgtgttcactaccagtttgaggcaataaatcttgcacggacttcggttttgcatttaatttgttagctaattgctttctttctgttttccctattgtcctcttgccagattcaatgtctgctgccttaactgggccgttagcgcgtttctttcgacctgtaggcataccttcatgcttaggattgttattagagtcatagcccttcttatttgctttagaatgattatgcttcttttcactttccttatttggctttgccggtttatctggcttcggatctggatttggttttggcttcggttgaggttctggttccggagtaggtacttcatcttgcttgtaagtaattttaatattactgtcagccgtatctactgaaaccttttccgctgccaccttactttgtgaagcagtgtagccactaaatgttggagcagtatatgcatcccactgagtattaccatctaccctccactcactgtatgtaactttgccagtaactttatcaaacgttactttttgcgtggtaatcagcttaccacctgaaggcgtaatgactgtaattattctagttggagtcttagtaaaagtatccaagtgatcatagttcttacttggatcaccttgcactgggcctgttggaacatcccttggtggagtttctggagtaacgataatggtgtcgtgttcaacccttacagttacagttggaatgccatcagcagttgcaactactgtcttagaaatatcctgtcctgaaacaatcttccatcctgctagagcttgtggatttacatctactgtttcactggtcttgccactaagcggagtttgccctacttctttgccatcactatcaacgtaagaaatcttccccgtttgagtgttgacagtataagtagcagtgacttcactattggcaaccagctttccagtaaccaagtcatatacggcagtccgcgtaaattcaacggtctgtttcttttgatcttctgaaatctgagctagttggcaattcttgatctggtgctaactcgtagttctctggaagcttcaaatcaaggttatcaacagttgagccagcaacgccagacttagtaattgtctgaccaacttgcttgttaccttcttgagtatcttcaaattcaatagttaaagttgcatccaaagtaaacttagcctttgaagaaatattcagcttgtagtttggatttgctttttcaagggcagtaatactttctggagttaagttaattacataaacgccagattcagctggaattccatttgcaaattcataagtcaaacctgccggaactgtaatagcagttggaacattaactttaaagtttgttccatcaattactggtacagtgctttcttgactaccagaaatcgttacattttcttcagctggactaattacataagtgaattgaccactttcagaaactgcatagttaggattatcatcttgcaatttcttcaatcccttagcagttaaggcaatgtagtaagtaccggcatttgttggcgcagaaattggcttaccattggcatcgacccattcataatcaccagctgctaggttagcagtattcaacatttcaccgcttactaaaccagttggagtgaatacaccgaagttggtagcttgagtgttaatcgttgcaggttgaccatcgtacgtcttgccatctgcgcccttactattaccgtcaagaactacattaagatccttttgtttaattgtgtaagtggcagagcctagcaggtcttcagcatccaaggtgacatttccttgaccagcgtattggttaagggctttttgcaagttaacaataccattggcactcagcttaatcgtgtaagtaccatcattaactggtgcgctgccagcattccaaatataatcaccgtcttgcagagcatacgtactttcggtagttgaacctgggaaagtaaagtgaactaaaatttgaccattgctgttaacttgtgcagttgttacagctgtaccatcaaatgtcttttggttagagccattaagttttgcgtcagcagtggctgcagtaactatgtagttagctgttgtcttaaatgtccacttgtagttagcaccattattaccagttagttgcttaagcttttcttgaccagcctgtgacaatttaacttggtaagtaccgacattcgttgcattaccaacaatttgcaaatcgtcagcggttaacttaagtgtctgagcttcaccatcagcggagtaaaccgtcgcatcgtaggttacgttgtacttattcaagttaagtccacttggtaaggtttgcttagcatcataagtcttgctgtcaccactattcagggtaacagtagcttcgccctggttaatgtacccttagtagttacatcagctgctacttgtgggtatgcgtagttagtacccaaagctttttcaatgttagccaacccttgcgcagataattccacgtggtattcaccgacattgcctggggtttgatcaaagatcaagtcaccatctttagcagtgtagcttaaattagtactattagtactatttttaccatacgtatatttacaacaacataatctttgcctggatcaggaacattaacttgccaagtttgtccagcttctttaggtagactccatgaaccagaaatcactttaaatcctggcgttgttgaatcacctgctgtttgatcccattgccaattaccataagtaatcgtgttattagcaacatttaaactaccagtctgggcatagaatacctgtatttgtgaatcaggtgcaaattgttgaccatttttgtcaccaccagcaattacatatttagccgttactgttctcgcttgctgttttactggaatatacaaaacagtgtgaactggacgggcttcataaactgaggcgttctcagtatatgctagagactccttaccctcactagatgtatcttccttattccaagttgggtaaacaaattggtttgctgacctggatcgccgctcttattgtaagcactataagaaacttccttattattttgagtagaaacatctttagtatcttctagactagtagcttttttatcttctgcctgtttagttgaattctgctcggttgaatttttgctagtcaaaggatcggtaccgctaacttctttttgagcagtagtatcgttatcattcttaccagctgtcgtagtctgatcatttccagtatctgtggtagtcttcttagccgactcaacctcttctgtttctactggatccgtagtatccgcatgaaccgtttgacttgtattcatcgtccaaagcaaagttgaaagcaaaacggaacaaactccaatgttcaattttctaatactaaagcgctgcttgccttcaaagtcatttttatttagtctttctattacgcggttttattctattcatctattttaacgcctaacataaatcacaacaaaaagcaggcttaaattatatgcaaaaaaatcgttattttaagttgtcagtcacaacaactaaaataacgattttgcttttttaatctttaattacttaaattaaacctgattccttagtaatcttcttcataccattcatgtaaggaacaagtacatcaggaacagttactgaaccatcttcgttttggtaattttccaaaatagcagctacacaacgaccaacagccaaacctgagccatttaaagtgtgtgccaagtgaagcttgccgtcttcatcacggtaacgaatttgtgcacggcgagcttggaagtcagtacagtttgaacaacttgagatttcacggtacttgtcttgtgcaggcatccaaacttcaaggtcgtaagtcttagcactagtaaaacttgcatccccagttgaaagagcaactacgtgatatggcaagcccaacttttgcaataagtgttccgcattatgagttaacttctcgagttcatcccatgattcgtcaggcttacataccttaaccatctcaaccttacggaattcgtgcattctgatcaaaccacgagtgtcccgtcctgctgaacctgcttcacttctgaatgctggtgacaatgcagtaacattgattggcaacttgttttcatgaataatttcatttctgaagtagtttaccaatggaacttcagcagttgggatcaaagttaagtcacgtggcttatctggatcgtcattatcaacgatggtataaacatcttcgtggaacttagggaattgaccagttccttgcattgatgcatcgtttaccaagtatggtgggataatttcggtataaccttccttagtgttttcatcaaggaagaagttgaagacagcacgttccaaaagcgcaccagcaccgatgtagtaaacaaaacgtgcacctgaaacctttgaagcacggtcccagtctaagatgccaaggtcagtaccaatatcccagtgagcctttggcttaaagttaaattcagtagttgggtgccacttacgaacttcttcgttgtagctatcgtccggaccaattgggtctgaatcagctgggaagttaggcaatctaagcaagatgtagttttgcttttcagttaattccgcaacttccttatctaagtctttgatttccttacctacttcacgcatagcagcaattgcatcgctagcatcttctttgttacgctttttttctgcaatttgcttagaaacgtcgttacgcttagcctttaattgttcactcttagtcaaatccttacgacgcttagtgtcgatttcaactaattcatccaattcttctggcttaatgccacgcgtagccaatttcttctttgaccagtcaagattctcacgaatcaccttaatatcaagcatataaaacctccatgatatgcataaaaaaagagccgacttatccctacacttgggacgaatcggctcttacacggtttcgcggtaccacccagcttcagtctatctagactgcacctctttaccagacgagtaacgacgtcaaaccgtgcaactattaattgcccacattattgaaatctggaagcgactatgcattcactcgcaccaaccgtgaactctctgaagcagtcttaggatttcgtgtttgcatttattttaagccattcttcttttttgagcaaataatatttttctttaaacgaaaaaagtgcactaacttgtgtgtaatcgacagtataaacatactgaaatcctagtgttttaagcaatttctgtgatttttcattatcggcaaaagttccagcccagacttctacttgctttttctttttaaaagcataggtcaaaatcaatcgtaaagcttcagtcatatagccgtgaccttcaaacgactgatctagcaaaaagccaacttctttagtctttaataggccactcttttcatctaagccgcgttcatacaattcaaccagaccgatcacttcattgttcttgcgcaagcaaacgacataactttcaggacgcgacatatattgcttcacgccattaaccgcctcagtcagattgcggtattcctcaaagccagccatcttgtggtagcggggattgccaccccacttcagtaattgctgcgcgtccctttcttcaaaaggtctcaaatatattctcttagattcaagcattagttacccatcagcttcaagagccactttgcaccaaactgtaggcctatactataggccgcaattgtccatggcttacacaaaataataatccaaaaataagtccaaaacttcattttagtcaatcctgctagcaggcaaagcacgtcatcgggagctgctggggcgagaatacataatgcaaagaaccaattaaatttattctgattctctgtccacttcatatatttatcaagcgtttcttccgaaacaatatgcaaaataaagggccggccgtagtgtctagctaaaaagaagttgataattgagccaatacaaatccccacgtagttataaataaacccagcaactgggccaaagaagaccacgcctcctaataaagacacgcccccaggaataatcggaataactacctgaacaatttgaatcaacacgaaaataatcggaccaacaatttgtttattagccagataagcccgcattttagcttgatcggtaaagatccccaagcggtaccaataaatcaccagcaacacgattgcgactccacaaactatagttgcaatattgattaatttacgactagccttagtcgatagatgcattttctcgccttccttcatcgcctagtagttcaattttaacaaaaatccagcccagataccgtaaacatgcaaatctaaaaaaagttttattattttagctactttgggcagatactatataataaagttaataagttattagaaaggtaggcatcttatggttgtaattaagaatgatattgtttatgacaagactaaagaattaaaaacggatatttactatcctaatgatacatcttctaataccaagattttaatcttctggcatggcggtggctggtttagaggtgataaagacagcgtcaaaaatctaggtattcgctttgctaatgcgggctttatgaccttcatccccgactactccttagcacctaaataccactttcctgctgctcatgaagatgcattgcactttgtcgactggctgttgaattctgaatacactgatcaagacgatatcaaaaacattgttcaaattggagccagcgttggcggtgaaatggcaattgaggttgctgggaaatacggtttccctactgtcacctggtctgctccagttgaatattcaaactggattaaagatcatcaagatactaaagcatccccagatgccgctaacgattttggcattaccgatcctgaaaagatcagacaatctttctacaagcacttcacattaacctacacaggtactgaagatgaggctgtattacaaaaattagacgctaagtcatttgactatagccatctcaagcaattaatgatgattaattccgcagatgagttgacaccactagctacagtattggattttgttaagttcttagctgacaaaaacttaggcgtacagctcctcgtaattcctggtcacggtcacgccatggcctatggtcccgattatgtagacgaatcgctcgattttttatatcaaactattaagagacaaaattaagtatgattaacatccaaaaattcgttcaagtcagaaaaaaactaaagttatcacaaactgagctttgccaaggcatttgtacccagtcgaccttaagtaagtttgaaaataatgggcaagtgccttcatttaaaattctcaagcagctttgtgaacggatggatattgatgttagcgatattatggacagcagtgagcacaaatatatcgcgcatatcctgtttgaagcggattttgcttttatcaattttgattacagtaaaatttttactttactttcacaaatcaaccccgaagtagacctaaaacgccaaacaaatcggattcattatcactatttgcgcggacaatatgctctaagaagtgatcgcaatcaaatgagtgcgctcttttatttcaacaatatcttgaccacccaggaattgcctgaaaatgatatttaccgcttgttggcattaaatggttgtagtcaaatctatgctaaacaaggtgaaacagagaaagccgagcactattatagtcaagtattaaagaacattatggacgtcaagatcgataatattttgactacaatgcatgccttaagtattttatgtgatgccggtgaattctatggcgaacgaaaaatgtatcgtgagtctaatgcattattgcgctatgcctataagattggcgctgagaagcacgtgattttttacatggcacgcatcctattgcggcaaggcatgaatgatattgatcagtcaaaaaagaaagcaattgctatccaacatttgcacgatgcctgtgcttttgcccgaatcaaccgcaacacgattacgctaaatcaggctaaaaaattactaaaaaaattaaatgactaagatccaatttgaaatatagtaataagagtttgttcatttgattttgcaaaaatgataaaattagtataaatgaacgctgtttaggagtttcagataggttgactttggaacgaattatcaagtttatgtttgacagtattggtagctatttatccattcgaaaaattgccaatacgttaacttcaatgggacataaaatcacaccaaatacggtagaacggtatattaatgcgttactcgacagtttgattatctatgacgtttcacgattcgatattcatggaaaagagcagctaggttcgctaaaaaaaatattacattacgcgtggtgctagttaaatcgttctagacaataagccaaattataagctaaaattgcaatttccaaccggctttgaaagcctatcagactacgtgctcgattgttctcggcattgtaataggtcagaagcgaaaagtcgctttcaattgttctgcgaatagccatcaattgatgatcattgtgctttttagctcctgtcatatttttacgatatggtgtccaaagttcgtaacccatttgttttagctgttgatgcagttctttgcctaaatagccttcgtcgccaagaagatagtaattagatggatgggtattttctatcagttcaactgtctccctggcatcatgaactgatgcctttgttacgacataatcaagaatgtaaccgtcatcgctaacaatggcatgaactttgaaaccatagaagtaaattttcttggtggccttataaccaatgttggcataaccgcgaaaaattttagcacgatagtttcgaattggttggcaaacaggtaccggaaagctgtcaatgatcaagaactgtccattcaggtcaacctttttattcatttcttgccgtatctgataaatcaattgcaatagctgacgtgaacgccgattaaaacgtgagtgtgataaacaattgaaacattcacagaatcttctttgtgattcaattcctgtcttagcttgccagataagtaaagccaaaatcagactgtccgtagttttaatttgatcaatatttcgccgatgagtaaactcagccggtgcatacaaacgataccagtgccgacaaattatcactaaatctttaaaactaacttgtaaatggtggctaaaacgcttaagcttaaggcagttcaatcagatcagactcttttctattattactatttacaagtcgagtctaacaagattggacttttttattaactaaaacgatttaactagcaccacgcgtattacattgttgatactgggcttagatatcatttgttggcaaatcaaaaaaagatcgtggacatataattgaaaatattgtttatcttgagttgcttcgtcgtggatataacgttactgtaggtagcatccctaatggtgaaattgattttgtcgcaagaaagaataacgaaattttttattatcaagtgtccgaaacagtgctagatgaaaagaccttagagcgcgaattgaaaccgtttaacaagattaatgatcattatccaaaatttctattaacaatgaatgaatttggcaaaaatgataattttaacggaataaagcaacttaatattttagattggttattagaataattaagctaagattaagaataataatttaaaaaaagaattcgaaaaatccccatttgtagtgaaaatgcctacaaaatggggatttttttagataatcttgtaaccagtaactggcttagcaggtactgtattgaaatcaaagctagcaagtttgtccagttcagtattaccatcaataattgtagtaacaccttgagcaatcatcaggttcattactttatccttgtctagatccttagtgaaggttaccaagactacaggcttatgcaaagcacgcatgaaaccaatttcaaaagcactaccatcatctacattgtccatgtcatacaagaagacgccacatgtagagttaactagaccttccaggtcattgttataagtggcaaggcgccaagtcatgctgcgaatgccaccaatttcaggattcttttcatccggatcaacaaaattttgatcaaatggaaaatgcactctgaccactgtcggattttcttctaacaaggcacgagccttatcaactcgagcacgttgatcatcattgtaaaatggagtgcctaaataaaccttagcagttgaaacttgtttgttcatgcttttgtcccttcaatgtttaaaacttacaaaataaaattatttttcattttagcatgacttttttacaactaaaagcacaaatagctgtgttttcattgtaaacgctttataatagaaacataacttattaaagctaaacataaaacttattggaggaattattttgtctagatatcaatcaattaatccatatactaacgaagaatttgcaagctatgacaattctactgccgcacaaattgacgatgccattaacttagcacacgctttatataaaaaatggcgtcatgaaaatcctgagacccgcagtcgtcaattacacaagatagcagatgctttgcgcgagcatgaagatgacttagccaaaatgatgaccctggaaatgggaaagcttttgcgcgaatcaagagaagaagttgaattatgtgcttcaatttgtgattactatgccaaaaacggggtcaaaatgttggctcctactccaatcgaatcagacttaggcaatgcctattatttgaagcaatcaactggcgttattatggcttgtgaaccatggaatttcccactttatcaagttattcgggtcttcgctcctaactttatcgtgggcaacccaatcttactgaaacacgcccacaatgttccaggttctgctgctttaaccgctaaaatcatcagacgtgctggtgctcctgaaggcagcttaattaacctttatccaacctatgatcaattaagcgatattattgccgatcctagagttcaaggcgttgcattaactggttcagaacgtggcggttcagctgttgccgaagctgctggtaaaaatttaaagaaatcaaccatggagcttggcggcaatgacgcatttatcgttttagatgatgcagatccgcaagtattgcgtaacgttttaggcgatgctagaacttataacgatggccaggtatgtacttcatccaagagaattattgttgaaaaatctcattatgaggaagtgctacatacgcttaaaaacgtcttttctaatcttcaagcgggtgacccacttgaagccggtactaccttgccaccaatgaattccgaacgtgccaaggaaaaattagaagctcaggttaaaaaggccgttgacgcaggagccgagattttttaccaatatccagagattgattctaaaggtgccttcttcagacctgtaattttgactaacatcgacaaagaaaatcctatttatgatgaagaattatttggccctgtagcagaagtctttgtagttgacgatgatgacgatgccattcagcttgcaaatgattctagctatggcttaggttcatctgttatctctaacgatatcaaacgtgctcaaaacgtggccgctcaaattgaaactggtatgactgtcatcaatggccgctggattacctctggtgaattgccatttggtggcgtgaagaagtctggctacggtcgtgaattaagtgacttaggcatgatggcctttgttaacgaacacttagtaattgatgttactaagaataatcaatagtaatttttcgataaaagaaacatactaacctagtgttggatcatgaatcgacggattcacgatctggcactttttattttgtctaaaatagaaagtgaagataaagcaaatcaagtcttcagctttttagacacttgatgtcgtaaaagaaacggactgctttaccacctattcttaagtctcttcgaagtctgtgggcacttagatgccgtgtttagaaaattagaattaataggttgataaagaggtttatcttcacagcggaggttatattatggaatcacaaattattttcggtattgatgttagcagtaaatcttccacagtttgtgtggttaatgaccggatcaaacaaggcgaatcttttagaatctctaatgattcctttggctatcaaaaactttatgagcaactgaaccaatatttgataactcctttagttgttttcgaagctactggtgtttattctctaagcctgcaagctttcttagaggattatcatattaagtatttgaagcttaatccgcttaaagcgaaaaagctaatggacaataatttacgccataataaaactgataaggtagatgcttatcgcctggctttaattcaatttaatgccccgcaaaagttgcgtgatccacagcccagagagtatcatgaacttcagaatgccagtcgctattatgaagaacttactaggagtatagttactactaaaaatcaattgcaccgcaacctccaatccactttcccacaaattgaagaaatactgtctcatccatctggcagaatttattgggcgcttgttagtcttttcccacatgctggatatgttctagaaaagaatgagacacaggtaactcaaatgcttaattctatttctggaataggacaacaaagggcacggtacttaaccacaagattatacgcttttgctagagaagcttatccttatgattccaaagatagtattatcgttagagctattcaaaggaacatttctaatttgttttcactccagcaagaacgcgactatgtaattaactacatggaaaagctggctaaagcagtaaacgctcgtgctttatccatctatttgagtatcccaggggttgctagaattacagcagtgagattagtagcagagctcggtgatctaagacggtttagcacttcagctcaaattgatgcgtttgttggcattgatccaggaaggtaccaatctggtgaaaaagacagttctcttggcattaccaagcatggcaatcatattgccagaaaaatactttatcgagttattattcaaatggagacggtaaaggctacgcagccttgccatataactgattattatgacaagaaaaaacgatcttcaaatagccaaggctataagaaaatcgccattgcatcagtccataaactgatacgcacaatgtttgctcttatcaaacatgatcaattatatgattacaacatagccaccaaaaataaaagactttagctgaaatcaaataatcaacttaagtataagcaacctatggaaaaactacaagtattcataggcttatttgtggtactttcgctttttcttaaatttaaactcttatttgctttaaccttattcgcatcattaaaacaagtaaatttattttcttaaatcattgataatacttgactttgggtagaaaatacgctggcaacttaaccagcgtatttcttttacttattattaattctatttctttttaaaaagattatatccagccaaaatcgtggtcaacacgctagccaaaatcataaagtaagctgaagctccgagagaaactgcatatgacataagttgactcgtcaattgagccagcaccccagttgaagcatgtgccgcgcttgatatttgaaaaatcatataaatcaaaaagattgattcaatcaaagaaaggaagaaggccaaagtctgactagccttagtatttttcaaaatattataaataatgaaaattgggaacaagaatagtagcaaccagacaatgtaaagaataagtgcataccatgatgtcacgccagatgaaagcaagcgccctgctaaaccgaacagtacattggaaatagacattctctgcgtgtaagccgaggcacccgagtcggtaaagagaacgattagactaactaaagccgtaaaaataactgaaatctgcacataattaaagtgatgtttgcgaacattttttatttcacgtacatgattttcaatccgaggatatttttgcacaaattctcggtttttcgctttgactttactttcacgtgcatccacccggttaaagacatcggaaccaattcggtcaatcttttgcgttaatcgcttatcaaccgtatactgctcgatcttatctttacgatcacacacaatataaagccaaaccattagggctaaaaagccagtccaccctgccgctctagaaaaactcattaggattaaaagtaagactcccaataagaagactaaggtcgcatttttcctaacccacgcaatcattctttggacagtggtgttttgcttttcaggaataaattcttcccgataggctgcacggctgataatcttttcgccttcatctggttcttcaaactttgctttttggtgctgatctgtgaaaaagtcgtctcgatatttttttagattgaagccacagtttggacaaatatcatctgtttcactaattttatggccacaatttggacaagtagtcatataaaaattcccttctttttcaatctgttagtcattattataacatgtatcagaatttgaagatcaaaacaaaaaaagaccgaatcattgcgattcggtcgaaaaaattatttactaactatttttcaacattaattggtaaaacattatcaatataaggtgaatgtccatcagcaatcaaatctgatatctttctcaacattggaaattgtatgttcctagtatcatttccaaacttttgatatgcttctggagttgcatctttatgtaataattcatatcctaatcttttgtagaaattaacactttcgtccacagattcaagataaatcagctgaacacctgtatacaatgcaatcaccatgcacatggaaaagaattccatcattagtgctctaccaattcctgttccttggtattccttgtcaattgcaaaataagcaaggtttatatatggtgtatcaactttataagtaccatcatccttcttaacattctgtgttaataaccctactgttgacgagaaaaaaccaactatctgatttttgataggatccattaatacaaaagtctttaatttctgtgtactttcgaacttcggacattccttacgaaaaaaattatctataccacgattagtggaatcaaaatgtagggctaactcttcaaaatgtggacacgtacttaacgggcataatttaaatgctctactttgattcatgcttttccttcccacgttgaattactatcccatcagcttcaacttctttttgcaacttttttatagacacacgtggtactggattggctattttgtttttgaattctttaaatgctttttcatttttaaatgttatctcagcatttctaacaatacctaccataattaccaactccttttagtgtacctattaatattatacaatcataatctgttttactattagtttcaagatttattttaacaaaaaaagaccgaatcattgcgattcggtcgaaaaactatttattaattatttttcttatttcttcttttggcgaacttattaaggtcaattccctcatatgtcaacttagtagctgctgacatagtaattggcaaaatgaagaccaagatgagcaaaccaatatccacggctaaggcaacttcaatcaaagttggaatacctgatggaatcaaggctgcaaaagtaccacccaagataattgcggctgatataacaaccgtaccaatgatagcacatgccttcaagattcttgaacttggagtagtgtatccttcagactcaagttcacgataacgagtcatcaggaagatactgtagtcaacacccaaagcgatcaacataatgaagctgaagaatggtgtgttccaagtaagcattgacttaccaagaactgctttaacaatccattgattgattgaaagtgagcagagataagcaataagtaaagtaccaagaatgtagactggttgcaataatgaacgagttacgaacatcaaggcaatgccgataccgattaacatgatggcagcagttctaaggaagtcgccactggcaactgtcttagtatcttcaatcttggaactttgaccacccatagctaccttagcattcttcaaagcagtaccttggaatgacttcttagccatagcacttaattcttgtgacttcttagtagcttcggttgcacttgggtttgaatcaaagacaacaataatttgagctgacttcttgtctgggctgaggtaaacatccattgacttcttgaacatatcgttcttcaagaattccttagggatgtagaaagtatcagcggcagctgatgaacctaaacctctgaggtaggtttcaccttgacctaaaccactattaacagtgtcaatacctgaagtcaattgtggaactttgcttgccaacttaccagcgccagcactgagttgtccagcacctgtgttaagttgactgatacctgaaataagttgtggagcttgaccagctaattggccgataccactgttaagctgaccggcaccatttgcaagtgtgccaagacctgtgttcaattgacccgcgccattgttaagtcggtttacacccgcaccaagacgactagcgcctgacgaaagtgaacctaagccactgcttaattgaccagcacctgaattaagtctttgtgcgcctgccacaccttgtgaagcagctgattgaacttgcgtcaagcctgagcttaattggttcaaagcagtagctgcacctggaagtgccttgttagaagcttgagctaatttagctacttgagtctggagagttgataattgttgaagtgatgaagttaaagcacctaattgtgagctaagtccagaaacatctatagcagcattacccgtttgagtatcagcttgtgtattactaaatgccttattaatagctgcttcagccttttgctggtcttcagtagttaagccagcactgccaatggcttgaagtgctgctcgttttgcttgtgcctgagcaccagcagctttttgactagctgctgacaattgtgctgcttgttcttgtaacttcttcaaacttgcagttaatcgtccaacttgtgaagtatctaatccactaacagcttgattcaattgttgaataccactgttaatttgtggcaaagcagtttgaagttgagcgagttgttgtttgtttgaaccactcaattgagttgaaagttgtgaactcaattgttgtaattggttaaccatttgttgggtaccactttgcaagctgctagcaccattctttaagcgatttgcaccgctaactaattggcttgcaccactttgaagtgcgtgagtaccacttgccaaacgaccagcacctgtttgtaaacgtactgcaccactttgtaattggcttgcaccattttgcaaacgactagtaccaccaactaattgttgggcaccactttgaagacgacccgtaccatcttgaagttgatctgcaccatccttcaaactattggcaccattagcaaccttgttggcacccttactcaatttgcccaaacctgaacgagcttgatcaacaccgtcgttaaccgtgtttaattgattgttgacataaagcatatcaattggttcgccgtaaggttctgtaacagatgtcgcaaatgaaacatcttttgaagcttgaagttgcttagtcacttgatcaattaacttcaaattttcttcattgtctaatctatgcttgctttgaatgtacaagtatgatggttcagccatccctttagagaagtgcttttgtactatcaacaaaccttgcttagatggaactgaatctgcaatttcatcagtgtcatcgtagttcaagtgacctgagtacattaacatgaatggcacaacaacaactgctaacacaaccaagtaaataattggatgcttcaatatggcagatgaaataccatgccataacttgtcatcactttcaccagtaaatttcttaactggccagaacattttcttaccaagcgtagccataaagaatgggttgagtgttaaaagcactaccaataaaacagcaacgccgaccgcaacaccaacagctgattggtaaacggagaatttagctaaacttaaagcagtaaaaccaattaagatggatgaacctgagtaaagaattgttttaccagcattgcgcaaagcgtcatgcatggccttatacttgtccatcccttttcctagattttctttaaacttgtcatacagcaaaatgttgtagtcggtaccgataccgaagagcacgataaccataaacacttgcgtaaagtttgaaaatgggaaattggcgcttttaactaaattagtaacaattgagaaggaagtaaggaatgaaacaccaactgtcaacaatgaaataagtggaacaattggtgacttaaatacgataaccaaaacaataaagataaagacaactgtaatggcttcagtcttcttaattccctcttgaattgaagcggagaaggcgtgctgcaagacatccgcacccgttacataagtacgaagcccttgcgttttcgcggccttgttcatttcgttataaactttttcaatcgtaccatgactcttagccacattaaattgtgctacccaagtcgtgccatcttttgattgaagtttctttcttgtagcaatattggaatctggaagtaatgaatccttgattccgtacttgcttttatcattagtgaacttatcaagcgtattattaatagcctgtttatcggcatcagttagcttgccactctttttgttaaaaacaagtgctactgcataagtgtttttctttttcgagccccaattgttctctattgactgtgccacattgctttgcacattacttggcaacgtaatgttagagtgatcattagtcagctgcgtaatgttaggcaaagcaacaacggaaataatcaatattaaaatccacgcaatcagttcgaaaacatggttcttcagaaatttctgcactttcctatttcctccctatttgttgtaaatcaggtactggttctacaagccgtaaaatcatttcatgataattacgattagattcatcttctgtttcatctccaaaagacttcgatttatccaaaaaaacgtaccctaatacggcgccaattaaagcatgaaatgaaatgacactttcttttttaaaattaagtctttcacccattttaattaaatccaagatttcttgattgatggccgcatcctttggatattcgttcaaatgatacagaatacttgataaagccggatcgcttaataaaaagtcgcgcacaacatccgcaaacttaagcaatgcatccctacctgacataccgattagatcgttcatcaactcatgacgtaagatcttaatctgtcttgcaccaactagtgatagcaattgtttgcgtcctgaaacgtaatgataaagcgactgtgagcggacatcgagcgccttagccaatgctggcaaagttgtagctgtcagtccttttttagaaattaattcagtagcttgatcaattattttatccagatcaagatttcttttctgtgccattttcatccctcctttgtcttagcatagtaaataatatacacctacagtgtgaagattacaatctacatagtgtaaataatttattttttctataaaaaaataatgaagccttctcggacttcatcatttccgttacttatgcttttttataaaccaagcattaaccgttttgcccaatttattaaaattcttgtgttgcgtgctccaaacagacatacagtaagcacgtccgttagtctgaacaattgcgacagcaaaatcatcatcaccaattgcataaatgccgccacttaagccagaaactaaacttggtcgctctttagctagggttgctaaaactcggctagcatattgccgatttaatacccgaccttgatacaagccaatcattgttttagctaaatcattagctgttgtctggccagtcatatttgagttgaccttagtttgagtggcacccatttttttagcaacttggtcaatattattaactccaatttttctagttaaggcactagctgcagttttgttacctttaagcattgcgctacgcaaataacttacaccataggtaataccaacttgaaacatcttatcacccttggctttgtcttttttgctaatcttaatcgcagttcgcgaccccatcttgcctttttgttcttgctcatacaaggcgatcagtaaaaataaccgcattgtttttcctgcgtcatgagccttattagtattaaaaactacggcaaagtgactagagttagttaaatcctgtgctactacctggaagctatcatcaatgcccataacttttttgatttgcttgactagcttctgattactgcctttttgagctttaacatggttagaatattcaatcgaattaaccttgggctccttaggcttttctaattttttaacctttggctccttggtcttctttttattcttagcgaccttgctgttatttggttcaacaatctttaactgcgcgttttccacccgctttatgtttgatgtatacaaaatgaatgcaaataaagtcacaattaaagaaccaattaatattttatgtttcattaaaacgcctcaattttagaagaaatgatgccttttcatcaaaatgactaaccaaaccattaaaacaaccatcaaaataatgattaaaacccagtcaaatgaattttttaaaattggtagactaacattcatcccataaaaaccggttaaaatagttggaatagttaataccaatgaccacacagttaagaattgcatggtatcattcaaattattgttcatcatattattactggtagctgataaagtcttagttacctgctgggaaatctgcaccatttctgcagactggcttgattcaatcaagacgtcatccaagcgttcactggcttctttagtgaagtctaatttgctgtgattcaggccatgcaacatgattaaatccgtctgaattgaacttgataaataaactaaacttttttcaatattcgaaagttccaccaaatctttattgttaatgtcatcagacaacttctgatctaggctgttacgttcaacgtcaagttgcgttacagcacgctggaagtattgtgatgaatataggaaaaagagcatcaacaactcagtaacatctttagcttcagacaaacgctcccgcatatgttcatcgttgaattcatcaaacacatagctggttgattctgtatggaaagtaaagatattttcacccactactaaaaaagtgattgggtgtgaggtaaagtgcttaatcgtgttggtcggccaaattggcacatcgtaaacaagcaagtggctcttagtatggacgtcatagtcatagtgaggacgttcgtgacggtcagaaatataagagataatgtcaggcgtaaaattaaaatcctgctgcaatctctcactgtcttcttcacttaaattattgatgtcataccacttatactttgttcttaccggaaaattttgttgtctaatcaaccagctcacctcaacttttattttattacctagtaaatggtaccatttttctcaattctttttccacaaaaaaacagaccttacggtctgctctttgaaatctaattgctatttaattttattgcttccaagcagcatcaaatttttgcttaccagtattaatttggatgttagtattttgacccttttgggctgcagcaaagatattttgcaaaatgctgttcaattggttgtatgcagcatttgaattcttagcaacaggaacactgtacaagttcttcatagcatcttgaagtttagcaggaagcttaatgctcttgttattcttgtattcactagattcgattgcactattgtttacaggaatgtaaccagtagcattagcccacttaatttggcttgacttagatactaagaacttaatgtacttaaatgcagcagctttttgttcagcgctagcgtggttaaacatgtaaatatcagtaccttgttgcatggtgtatttgccaggacgtggagcaacatcataagtaaacttgttacctacaccttgcttaacaaagccttcacctgcagaagtaccaacaaacattgcaaccttttcgttagcaaatggacctgaaaggtagtgttctgaaccagctactctgaagtaacccttcttaataccatctgcatagaagttgagaactttctttgaagttgaaccactgaagttaatcttatcagtaaagttcacgccttcgtccttcataccaagagtgtagtagttggatagtgaatcaaaaccagcacctacaactttgtggttactcttcttgtagatagtttctgaaacatccttaagttcttccatagtagttggaactttcttgatgccatatttcttaaacatggtcttgttgtaagtcaaagtttcaattgacttgttaaatgggataccgtattgagttcccttaatttttgcaccatcaagaagttcagttctaatgtcagatgcctttgcactgccccaaccaacattcttgttgttgatatatggggtcatgtttacaagcatcttgttttgagctgcgttccaaagccaacctggataagcttgagtaatagtaggtaagttatttggtgattgcaaagttgagttgatcttagcttgcaaatcattgtatgcaccttggttttcaagcttaacagtaattttagggttcttcttttcaaattcattagttaattgctttaaagtagaaccttgtactcccggcatagcgttccagaagacaactgtagtcttcttagtaatctttgatggaatcttctctgaacttgatgaagaagaattgccgctctttgaacaagcagcagtgccaactagggccaaagtagcaacggcagccatagtaagtttcttactaaacttcatttggataaatcctcccaaaaaataaaactaaacaacaatatgtttttgatttactaaagcgtgattgtttgaccacgtttaggtaaaatccgttctccatatgggttctcttccagctctggatgcaatgtgtgcaccggtactaaaacagctggttgaaccccagcaatgatttccttgagttctttttcatcggcatggcctgaacagcgcaacgccttatactcaatatcattgttagctaaagcctctacaaatggtttgtaggcaggatcaaaatcccctaatggctcagcatttgagtggatatacaaaccacccttttgcagcttatcataatcggtgacaacttgccacatgtatttatgattatctgctaaaagctcatcatagctaacttctagctctggcttaaggtcagcatagtgctcctcattaggcatgtaatagtaaggatagtcttcatccaaactttcattaatcaaatgggcacgctgagcatgtaaaacgacctttcttggtgaatcggcaatgattcgcaataatcgttcaacattagtaggataagtattaaaagtgatttggcgttcaggattagccttttgcaggcgcacgatttcttcagttagttctacttcattcttagggccagtaaactcttcactgttttcatcatgcttttcttctggccaagaaacaccagtaccttcaatgattagcatatcgctatttttagctgcctgcataaagtcccgcacccaatctggatgatagccatgcaagcgaatgtcgccagtataggcgatttgcttatccggtgtcttaactaatagaccagtagcaccgtaagcgtcatgatcactaggatatatttccaggataatatcgcccaccttaattggtttcttgtattctgccgcgatgattggacgagtataagtccgatcatgacctgcagcaggaagcaagaagtcgcccttttcattcaaggctggcaataaatgagctgtaattggacctgcataaagtggaatttctggggccaaaaagttcattgccttactgtgatccaaatgtagatgcgaaatataggccgccgcatgctcccagcggtcagtatcaattggcttacccgttaatttaggatcgtaaaaattaggcacatccccgattaatttatttttaatcagagtttgataactttcatctggcaattttaactctggccgataaacttcccccaagtcaaacaatacatgcgatttgttataggccacttcaatcatcggtccaccaattgtggttaaaccattataaaaagttactgtcgttttatcctttaaggtcattgcgcactactcctcgaataatttgctttctaaagatgaagtacaaaatcaagattggcaaaacagtcaatgtggcagcagcaagttgaagttgagtttcactacctgcatcagatgcaaatgaagttaaaccattgttcaacaatctcatgctgtcttcgttagttaccaataatggccagaggaatgaattccaaccagaaatgaaacttaataaagcaacggtgaacaagccacctttagacattggcaccaaaattttccaaatatattcccaatcactcgctccgtcaatcatcgcagctttataaattgtctgtgagattgaaccgaagtagctttgcaagtagtacatgtagaaaattgaagttaaaaatggcaataccaaaccaatataagtgttcaacaagcccattctggcaatggtattgtagttagtaaagataattgcttcaccaggcaccatcaataatgataaaagtaccatttgaacaacacctttacccttgaacttcaagttaaccatggcaaaagcaccaagcaaggcgttaaacaaactcacaattgtcgttacactagctgtgataaaagtgtttaggaagtaacgagtaaatggagcttgggcgaatactttggcataatttgaccattcaaaatgcttaggaatgattgttggtggaatagtggttgtttctctaaaactcattaatccacccaaaatcatgtagataaatggaaagacagtaatgattgcgaaaatcgctaaaataatataagcaatcaaagtgccccaacgaatcttcttcatcctttactgtcctccaatcttcttcatcatcttgcgttgcaagaatgtgacaaacataatgatgataaataagacaaccgttgcggccatcgctacacctggagtaccaacaatttggaacttgttatagatgtagaacactgcagttgtggctgagttaccaacacctgcttgtccattgaataaggcataaacagatgtataaatcttaaatgcagcaatgatattcattgttaataagaaggcgatcgttggcacaagctgcggcattgtaatacgccagaacttttcagtaccagttgcgccatacatatccgcaattgtgtagtaattagggtcaatgtttctcaaagcccccatcaagataacgatgttaaaagctaaagaagtccaaacaccaaagatgataattgtcgtcaatgacatcgctggatcatcaatccagttcggtgttggtaagtgaaccgccttgagcaagaagttaagcaaaccatagtcaccgttaaaaatataacggaatacgataccaatagcgatagttgacgtaacatatggcataaagaaagtcgtttcaaagaatgacttatgctttatcctgctgaaaataaaccaggccaacatgattgaaatagccaaagcaactggcacagaaattagggcatacaaaatagtattcttgattgcccgccaaaattctggatcactaaagatatattgataattgctgaagccactccaatttagattaattaacgagccgctttgaaaactcattacaaaggcccgcaaaattggataaatactaaagaaagtaacaaagataattgttggcgctaaaaagagccacgcctttttctgattgctcttcattagtagacacgctctccttccttagtaaacaggaatactcgatcaagacgcatcttcaaattgatattatcaccaggcttaattggtgtctcaaggttgactaatgaacgagcttgtaccccatcatgggtaaacttcaaaattcgttcacgaccgattaattcgacatcatcaaccttagctgaaactgcaccatcttcttcgactggcaaaatattttctggacgaacggataaaacgtactcgccgtcagttaagtcacgtttaaaacgatccttgtctaaatcgtccacgttaatttcaaaatctgagccagtaatcttgccgccattaacctttacattaaagttatcaatcacaggattaccaacaaaattagcaacaaagtagttatttggttcaagatagaagttttgtcctaagtcatcttgttggatcacgccattattaaagagaataatcttatcaccgattgacaaggcttcttcttgatcgtgagtaacaaacaaggtggtaatacccacacttttaactaaagcacgaatttcttcacgaatcttcaaccgtaaacgtgcatccaagttactcaatggttcatccatcagcagaatcttaggttgttgcactaaagcacgagcaatagctacacgctgctgttgaccaccagataaattgcccggcttttgatcagcaagttcggtaatctgggtcgttgccatatatttttcagcaatcttcctcgcctcatccttaggcatcttttgcttgcccacagtcagaggaaacattacattctgaagtacagtcatatgtggatataaggcatagttctggaaaacatagccgatctgacgatccttaggtgctacgttaacaactgacttgccatcaaaaaggatgtcaccgctagttggattaagcaaaccagctagcatatttaagatggttgttttaccacaaccagatgggccaagcaaacatacaaggtcacctttttttacggaaaagctaacatccttgattgcttcatgaccgttatcataaacctttttaaggttctttacttccacgaatttctcatcattcataagtttcacgcaccactatatattgatttaaatttttaaatttttctattaattctaagctaaatatacgaaaataacaaataattttcatttgaaattcggggtttcaacgactttgtgaaatgcttctcagcaagtattcggcttttgttcgcatttgcttttatttttcacttatttctttttaaaaattcgggtttactaaatattgtggtaggtaccaaaaaagccatgaattagtcatggctttttgtatcataagttatctccacgttcaaattgatattttgaactattcaaggcttgacgaaccaacttgctcatcaagttcttagtctttttggtaatcacaccagcagtttcatcattagcgctagttaaatatttaataagctctctgccttccatatttttagctttttcatcaataagatcaattcggccaataccgtagctttgacaatcatcacgataggcgtttacctcataaatatattggtgatagcgtggttcaacaagcacttgtaaagttttatacaaccagtaagcactactatctgaattaaccatatgatctgccaccttatagttaagtggtgtatcctcaatattggtgtagaaaggaacatatggtgaatatgcataaaagcccatattaatccattgaattgcagccatcttggcaggaacatcatttctaatttgcaagatgcttgattcttggtttctgtctaaagcaatagaacggaacatcttttgttctttttctgaaccagatgaaaaagtgtccattggatcgtatggtgtaccgttatagtgactagttaaaaatctttgcacatcttcaacaccaatcttcttttcgggaacgcgcgtaaatggcatttcttgactagttgggtcttgttcaatgcttggattaaacaacttctgtccataccaagttcttggagtattgtaaaaagcatcagcttcatccttagtaccaaaaatatctctgaaagaaaagctaccgtcagtactattgtttaaatgattcttttctacgaattctcgaataccagctgaatacataaagttatctggatcatcaaagtcaacattttgaatcaccatgatgttaggacaaattgcgtaagaatcatcaggaacacgagccgcaacccattggtgacccgcgccagtttccagataccaaacttccttgttgtctgaaaaggcaataccgttgctttcaccggtaccatatttttcgattaattgccctaagcgcttaacaccttcacgagcagtcttcacgaatggcaaagtaatataaaccattgagtcttcgttgattccatttgctactaaaggatcatgtcctaagcagcgagcattagtagcttcagtttcagtggctgacatagcaacgttatattcgttaatgccttgctcgtcccagcgaccttctgaatcatcagcagtagggacagcagtccatttgcagccatcgccctcaaggtgcatcttaaagccgttatattttgatacataatcttcatcataatgacgggctgggtttaccacaaaaactttttcgttaatgccaccataaccgtcttcgtcacgcgcaatcatggttgatccatcgattgaagcgtccttaccaactagcattgcagtacagttatcttttttcattattgtttgtacttccttttttatttcagtaataatttttcatattattaattctactactcattaacctgcatttgccgatcaacttttgctcgaccgttattatagttaaaaacataaccgggctgcacgttatagagatagacattgaagtttaaactgccatcagttgaaacggcctgcaaattcacgccgcgggccattaactcattaccacgaaaaacagcagttgcttgataaattacacgcttattctgccgcagtgctctcctaaccttagcctcaaaaatagtctgaatcttttggttagaataagcagattgcgtaaacaaattcttaggattattttggtcccctgattgattgcgtggatcataattgccgctttgatcaattccagctgagactgaataggcaatcaagtggccccgattatagatttgggtaccgttacggtgattatagtgccagccagtcggttcaacatattgccttactcgcaagctatcattagccacattgcgcttttccaaaaaggctgtattagagcgcgatgttcgattcaatgaatcaaggttagagtaaatcacccgatttatcttccatgcgcctttgaccaaagtcgacttatcatggttgacttcggtataagcgcgactgccactcttaaaattcaaattagctaatttttgataatcagttggcgatagacctccataattggtcttggcttttgatgcatcgctaattgtattagttacatgttcatcattattgccagtaaagtcacgcaaaaactggctaccatttggatcgctgccagctttagtaaaaactccccataaaatcgcgattaagacaattaatgatgaaacaaccgttccttgtttttttcgtcttcttcgtgtcatctttttcctctaactacgagcccaatcatcaagcatgcttaagaaaaaggtctccgaaaaacgcttaatcttagcaccatttttgatcaaatcacgtgctgcattcaaatcctgattatcttttctaaagaaatcttgatcacccatgattaagtaattagtcgttgctaacactgaattgtcaacttggccgcccatattgttgatcatcttgcccgcttcagcttcgttcatatgaatattgccagacaaaacgatattcttattttgaaccggattgtgccaacctaagtcaacataatccaattcgccaatagttaggtcgatattcttaatcttgctttgtgccttttccaataaatcatcagtaaagtgctgggcaaagtcatcataaaccttgatcgtatcaagagaatcctgcaaaccgtggtgagcctcaacttgagcaattccagcccgctgcatgcagtcaagcagacggttatggcgctcgcgtggataatatgtccgcgccaaacgcaatacgtcaacgtaatcattatcaagcactggtaagccatatttttgacttaaatcatacaaaaagttcaagtcaaaattgacgttatacccaatgataacgtcatcaccaataaactcacgaaattcacgaatagcctgctcagccggaataccttccttcccaatttgctcttcagtaattccatttagcttagtaataaaagcaggaacagaattattcttggaaaacttcaccaaattagtatattgatcaacaatttgaccgttacgtaccttaaccccacctaattcagtaattcgatcgcggtaaggatataagcccgttgtttcaatatcaagcattgtataattggtcaaaaagtcaggcttttcctgtccttttttacgcaacttgtcttgcgcaccggtcacatgtaaaattccattttttatgtaaatactcattcttcacctatttaattatttaatcaaattcatcagcatctcgtgcgaattgctatcaaaacccattgctcgtttcttaagatcagctggcaaatctgcatcagctaaatcagcggcaatataatgccaattaggaaattgctgcactagctttaccattggatcaagtaattgaggactggtctcatctacgcctaattccaaaattacgacattcttgtcctcggctcccgttagaaaccaacgaaaacgcgtattagcatcggtatcagggaagaagttagcattcagcggcatatgcaattccattggactattgcagtcctcgcactttggtactaaatctgccgttacgttgccgttcttaattgccgtcataaagcgttctactacttcatggttatccttttgaccatgattaatcccgctagaacactgcattttagtccaatcaccaaaggcattgaaaattcgattttcattaaagcctgcattttcaaaaaagtgcccgaatgtactggtcgcaataaaatattttttatcacgaattagcttttttagagcaagcatcgtctcactaggctcatattgtaaggaatattcgttgattagctcactccaaaaagcccattgctcgctccaagtatcaaatctcttatctaatgcatccccaattgtatgcacatcatacttatctgcaattttgccaaattgatcatcaaagccttcttcacttaggatatctagtccctcttctttggccatgccattaccagccgttacgatcaccgtgttagcatttttcagccatttttttgctgtcactaaatctgccattttatctctttccctttgaataacctgtcaagcgtaattgtccattaatgtattctcctaagaaaacatcactgatactattataacctgcctcttcaacttgttgctgtaaccaagcttcgcttttgtgaatcaactctaagacatcaatattagcctgaccatcactaattattgggaaacgaatgttagcttcatcattttcaataatagttaattgcccgttttgctcaaagatacaattcttaatcttttcaacagagtagatacctcgactgcgcaatttaaacattaattcattagcggagattcctgctttcatacagttgccaactaacaccttgccatttttaattacttgaacaggtttaccatcgataatccctctaatccaattattgtgatcacggctgaatttcaaaataaaaacaaccaacgtccaaacaattagaactaggaaaaactgaagaattgtaatactaggattgtaaatcaagccaccaataattccacctaaaacataattctgcaactgatctaatgcagtcgtaggagccagattagacttaccaaagacattgatttgaatgattaaagttaagataccgagagcaaacttaatgaataattgtgtgtaatctagctgcattattttattacctctactttatgatcaattacatgggcttgcgttaatgtgtaagtattgcgatcatcattaaggtttaactgataatcaatatttttagaatcaatccttacgatcatgccattagttaaaaccgttgaactaactaaaacatcagaagtcgaaacattttcatctttagcaatcgatttgatgaatggcacgatttgaatcgcctgtgatttttgcgtattaagttgcacatatttttcatattgcgtaccggcaaacaaaagcaaaaataataaggcaataatacccaaatcgcgatacttggttgcaaaacggttatgtaaatatagcaaagcaaaaattatcattgctaacgccgagactgtcaagaagtttgtgtaaataatctctctcgttgattgacttttttatttatcttttaatcaaaataggattctagggtgtctcgaacttgcccaaatcctttatgaatcctgttaaagtaacggtcattgtaatccattgcctgaactccaataaaggtgtcaagcgactgctcagttggaaattctgttttaggcttggttttccgcttaagcctgttgttaaaggattcaatcatgttagttgagtaaattgaagctctaatagctggcggatagttgtaaaaggttaacagatcaggctcaacctgtctaagatctctaactacgtttttgtaggctttttcccagttttgatagaattcatgcagcacctgtacagccatttctttgtttgactgagtatgaatctgcttgaattcatccagtgctttttttcgatcgtcaacccgcattttggcactgatattacgcatgacgtgtaccaagcagcgttgaaaatgcgctttaggataggactggcagatagcctctttcatgccaactactccgtcagacaagaagagctctacctgttcaaggccgcgactcttgaagcctttgagcatttcgctccaaatctcaatattttcagtaggcgcaatacagtagtcaatcacttctttatgaccattaggtttgataccgatggcgatataaactgcttcgcgctcataagtgacccgcttaagaggaatataggtggcatcgagataaacgcagaagaacttatctgacagatgtcgctgatgatatgcctcaactttgggaatcatttctttagaaatattggaaaccatagctggagaataatagccgccatacattttctcaatcaaatcagcgatttctcgggttgtgacgcccttggaatagagcttgataacagtttgctctaaaacatcagtatgccttttataatctggcatagtgtgttgatgaaactcaacgtttctgtctctaggaactttgatttctatttgtccgaattgcgtatcaaccttgcggtaataagcaccatttctagagttgccagtattccagccatttctggcatagggatcatagcccagaaaggcagtcaattcagcttctagcaagttattaacagcctgttgtagttctttgcgcaataaatcatttattttgtctggattgaatagagcttgagcaaaatctttggtaaaatcattcatgaaggagttcttctttctgtatgtgtttttttgttcaaaccaatcatacgagaaaggaactcctttttctaatgtttaaagaaataaatttaaggaatcattcatccttacacaaactattttacagtctcctaacgccgccaccaacatcaaagcatataatactgcctgattagtattctggttattttgaatatatttcattgtataaaaggtcatgctctacctcacccttcatatttttctttcattctaacacagaaaaaaagtagcactttcgtactacttttactagaaattattcacttttcactattattaattatttttgaatttcttttaatccagctttgcgacggcccatgttaaaccatggtgaaacagtgaaggctaacacatcattaattacatagatcaatgaattaattgccatggctaagtttgcatcaccttgagcataagttacgcccaaaagaatcaactggaagacgccactagcagtccaccaaaagtattgattgttgtaacgcataaagcacatgatcccagcagttaatgaaatagcaaaactaatagcatcaatccaaggacgaggatcattggtaaatttaccaatcaaaaagccggatacaacataaacaagtaaagtaccaacaatagcaacaagccattcctttgaaccgaattttcttaagtgattcttagtgtcatcattccatgatctaacagcaataataactggtaaatctaaagttgcaatataagcaatctgttcaaaaatggaaagataattcttagctgaccaacctgcatagataaaacaagcagctgaaatcaaccccaaccaaccattaattgctttagtagcgttaattgccaatacacaaagtgtacccaaaagcgtaccaataaaagtaatcaaagttacgcttgtaattttgccttgaatcagcaaagctaattgaaatccaaacgcaaaaaaccataaacagtaattttgaactggccagcctttcaattgattaaatagccaaacaaaataattttcgtgttttctttccattgtactgagacgtaaaaagtagacaattaaaatattggattaatagaggcttgacttcgatactctttcggggttaagccttttaatctgctctttatcctttcgttgttatagtattcgatatattcctcgattgcttgagttaattcttgaagattatgatacttgtattcttgatcatagaacatttcagttttgagcaggccaaagaagttctccattagcccatcatccatggagttgccctttctggacatgctttgagtaataccatggagttttaaagctcgctgataacgagggctttgatactgacagccctgatcagtatgaaaaatgcagttattaagagctgtttctttggcaaaagccttgtcaagcattgtcattactaaatccatatctggatgtttggagatagtataagaaactatatcgccaccgcagccgtctagaataggcgataagtaaagcttttcattattaagatgaaattcagtgatatcagtataccattttgtgttaggcagggctgcgaagaaatcacgatgaattaaatttggagctattttgccaatagtacctttatagcttgaatatttgcgcttattgcgcctgatgcctttaagacctaatttatgcatccaatagcgaacggttttctccgtaactttccagccctctctgattaactgcaaagctactctgcgatatccatagcggccttgatgatgattaaaaatctcatggattctagcaataagctttgaccgtttaggcttggcgggctgtcgtttgataatcttgtagtatgagcttctggcaattataggtagctcagggtgctctgcaatcgcagctaatacataatttaaactaactttgaattcttgccttagatccgtaatcaccctagctatttcttctgatcttcttggtccaaggcacttagtttttttacgtattcgttcacaatacgcaatcgcaagttttcttctttcagctgctggatctctttctccagttccttgcgagatttctgcttttctttggtcacgggcagggcgtcctttctgtttgataatgacattatacccgtttttcttatattctctaatccaattgttaagcatgccaatacttttaaaccccagttccaaagacagctgtaagtatggtttattgccaaagattgcttgttcaatagttcgctgcttaaactctttggaatagctttggtttttagtagttaaaatttctattccatgcatatcaattaatctaagcatatagtctaaattagctagattcattctgtacgctttagccaattgactgattgagatattttcatctttccatttatgataaatttctattttttgttctttattaaatttagacatagtaaacattctaagctaaatagtgaattagttatccgacgggataattgattcactatttttattcttttgtagaattaaagtagtggtaaaacgatatgccctgaggtctttagacacttgatgtcgcataataaactggcagttttacttaagttttcaatagtctcttcgaagaatgtggacactagatgtcgagtttagaaaattagatctgatttcttaagtaaatacgttttactactaagttttggaggtttttattatgcaagttacttttggaattgatgtaagcaagtctacttctactgtttgtgaactaattggtgaaagccaaaatgaactaaccattactaataatcgtcctggttttattcaattgcttcatgaattaaccgctttttctaaacatccgcaaattatttttgaagctaccggtgtttattcacgcagactgcaggcttttcttgaagactacggctatgaatatgttgttattaatccgcttaaagccaaaaaagagatgaatatggggctacgctacaacaagaccgataaaactgatgcttatcatttagctttaattcaaagactttatcgccatccggttaatcaaagcgaatcccaaacttataagcagcttaatgctttgagccgcttctatgaccagctgacaagtgacttggtaatagctaaaaatcgacttcaccaagctctacaatcgacttttcctgaaattgaaaatttattttcttctgctaaaggtaaaaattactggcaaatagttgtgcgatatcctcattgtgacttagtaagaagagaagataaaaaacagcttattaactggttaatgagcttaaaggggattgcttttaaacacgctctaaggactgcagataaattaattgaattagcttatcaagcttatccagttgtatcttgctctagcatagaagtcgagcaagtgcagtattatgcacacagattgcttaatttaagtgatcaaagagaaaatttaatcgcaagaatggttaagttagcgaagtctttgcctaatcatgatttagaaaacctagaaagcattccaggctttgcacagaccactgctgtcagagttttagcagagttaggagatttacgcagatttagtaatcctaataaaatcaatgcttttatcggaattgatccaggcagatatcagtcaggagaaatggactctaatttaagtattactaaacatggcaatgcagtcgcacgtaagttgctttatcgagctattggacaaattgataatgcagctaagacaaatccgtgtcatatagcagattattatgaaagcaaaaagctatcctctcaaaccaaagggttcaaaaagatagctattgcttcaattcataaactaatcagaaccatttatgccctgattatcaatgatcaaccatatgattacaacgtagccacacataatcaaaaagactttagtcgtaattaattgatcaagtacattataacgctaagcccaaaaatcagatatggatctgggcttatttgtcgtgtctaactaaaaaaataaatcgacactaaaagatgtttaagttgaaatttaaacaaaaaatgaagccaaacttcttattatgcttgactttacgtagaaaaagacctaaaagtgtctaacttttaggtctcagttcacatcctattcaacattccccttttttattttaggttgcaaaatacaagatcttgtgccttatccgtgctatgtaaaaaaacatcgatatctagtatagtggaccattaattaaatacaagaattgacatttttaatttttgcgttaataacatatttctatttccgtttatcaagcaaacatttattaattttttctaaacagcaaaaaaattttgttccttttagtgacacagtgtcatatgatatatacgtgattattaatttatatttttatggaggtacactcatgtttaaaactaagaaaacgcaatttgctatccgaaaattagcacaaggcgcctcagcagttttactttgcttcggcatattgggcggagcaagtgcacctatcgttccagctgcaactacagatgacccaacaaaaacagtcactgaaagtacaattaatagtgagaatacttctttcaatattgaaaccaccaccaatgcatctgataaattcgcttccatcagcaaaaatgggggggtacaacggtagtgccaaattctgctgagccagtttctccggatcagtccattacagaaaatgataatcagcaagaaaaaactactgtagagaattctactgagatatctgagcctgtcaaagacatcaataagtttgataatgatgccaatgttgataaagacgaaacaatcactgtaaaaaagccaacaattaatgtcgacactgaaaaggtagaacaaggcgatgaaacagagaaaagtaaactcgaagaaattaaaaagtatattgaggacgtagccgcaaaacatccattaggcattgccggaattttccacctttttggtaacgaaatagatggatctgctcatattgcaggaaatgtcgcaacagacaaattaagtgctggcaacttcggtactatccaagatgccactagtaacttgactacttgtgatattcattacatcggcagtattgatcatttgaatcagattgatggcgaaaataaactagttatttttggtccagatgttgaatataaatcatacgaaaatggtagttccattcaggtaaaaataaatggaaattggcaaaaagtaggaattccatacaacaaaactatcagagctgaccaaattctagatattcaaggcgaactagataaattaagcgataaatcagacgaatgggctaagcaaacgcaaaccgaaggcgtaattgctgatttcaaggagggtaaatagttggatcgacgtttctaatgctatcaaggatggcagcaaagatcctatttatgtaactattgatgcaaaatacctttcaggcaataacaagcatgaaattgctattaaaggcatccctgcagacgcagaaacaccaatcatcatcctaaatgtaactaatgttcaaaatggcgatttaaccgttagcacaagacttgttttggattattcagaccaaactagcatcaatggcgtaagtgaaaaaccatctcaacttaataagttattatggaattttggaacagatgttaaaaatttaactattgaaggagacttccatttaggtagtattttagctactaacgcacatattaccgctaacaaaaatgttgacggtaatatcattggtaacaaaatcactattaaaggtgaaactcaccgttgggacctaactccgccattagtagaagttgaaactccgccggaggatccaaaagatccacctaaagaccccgaaaagccagagaatccacctaaggatcctgaacctactcctgagcctgaaccggaactaaagcctgagcctactcctgatcctgaagaagagagtactcccccattaccagaagaagtaattcctccaactgataatgaaaattcctctgacttcaaggaagaggacactgctcctctaccagaatctgttgtagaaaaacaagttaaaaagaatcatccatccccttcaactactgaagaaaatattgcacctcatgctgcgactatcccaacctcaactataactgaaaaagaaacagttttacctcaaaccggtgaaagccaagacaagctaatgacgattggactcatcactactagcgttgcttcattgtttgcagtattaggcacagtaatcaaaaaaagaaattaattaaaaatgattcaattcaagccatttttattcttaaaataatctagaattaagtgaggattaaaccatgttaaaaaatagactaaaaatattccaacaaattcttcctactaaggcaactaacactccaaaataccaattgcctatcaactattacgatcctgaaggcagcatggttggcacttattctggaattaacttggcggcaaatgaaactatcactcaccaccagctcaaaagatttatcaacatccatcttcccgaaaactacgaagtttttccttactttgcttatcctaaggagaatatcacctgtgaaaatctgcctgatgaaataatgatcacaatcagattatctaattaaaaaaggcgactcgattgagtcgcttttttcattgcaattgatattaatgttgcgaagcaccagttgtagtatctggttcttcgtgcttttcttctttaacttctgcagccttagttgaagcaccagttgcggcgtctggatcagaatttctacggtaagttgcaccagtagttgcatcatcatctactaccaatttttgaccagtagtctcacagaagtacttaactaatggatataagtctttgacccattcataaataccagcatagttaccttggtcgtcttctacacgcttataatagtccacaaccaacttcttcaaattgcctgttggtattggcatataaacatcatcatgacctgcttccttagtccgcaaagcatgaacaacttttttaacattcggaataacgtcacgaacatctgggtgaactgcgcgcatcgtatcacccacttgatctggcgtagctagcattttcttgttaggatcagttggacggttataccacaagaattggttattatcatcaacaaatgtcattttaccaatggtatttctcagcatccaattaagttggttaacagttaacagacctgcatcaagtttgacataatcgtcaccctccgcagcatgaacttttttagctgctttatctagccaatcaggatcatttttatcgattccctcaactgtatacttagacttaccctttgcatcgaaatcttcttttaagtattcatcggcattcatatctttaagccattttggttcagccatagtaagaccccctcgtatgaactttgttaatctaattatataatgtaagtggtttcaattcaacaattttaatatatttatataatatttttactagctggattatatattattttacgcgtggtgctagttaaatctttctagacaataagccaaattataagctaaaattgcaatttccaaccggctttgaaagcctatcagactacgtgctcgattgttctcggcattgtaataggtcagaagcgaaaagtcgctttcaattgttctgcgaatagccatcaattgatgatcattgtgctttttagctcctgtcatatttttacgatatggtgtccaaagttcataacccatttgttttagctgttgatgcagttctttgcctaaatagccttcgtcgccaagaagatagtaattagatggatgggtattttccagcagttcaactgtctccctggcatcatgaactgatgcttttgttacgacataatcaagaatgtaaccgtcatcgctaacaatgacatgaactttgaaaccatagaagtaaattttcttggtggccttataaccaatgttggcataaccgcgaaaaattttagcacgatagttgcgaattggttggcaaacaggtaccggaaagctgtcaatgatcaagaactgtccattcaggtcaacctttttattcatttcttgccgtatctgataaatcaattgcaatagctgacgtgaacgccgattaaaacgtgagtgtgataaacaattgaaacattcacagaatcttctttgtgattcaattcctgtcttagcttgccagataagtaaagccaaaatcagactgtccgtagttttaatttgatcaatatttcgccgatgagtaaactcagccggtgcatacaaacgataccagtgccgacaaattatcactaaatctttaaaactaacttgtaaatggtggctaaaacgcttaagcttaaggcagttcaatcagatcagactcttttctattattactatttacaagtcgagtctaacaagattggacttttttattaactaaaacgatttaactagcaccctgcgtattattttatataaaaaaagctgatcaacgagcaactctttacatctttgtctcaattgtatgagtgtccaaatgaatgatcacgtcaaacatcgctttttcttctggtgaaatcttatgagccacctcaataacagcaatacgtggattcttcaacagcgtcttatgaatgcctaacgacaagttcgggtcaagcgcacttgtcgcttcatcagccagcaaaatcggccgatctgataaaagcgcgcgagcaatttctactctttgaatttgtccacccgacaagccactgccgttttcacctacagccttgtctagaccctgttcctttaccaattcatctagaccagcctcatgaataacttctttcaaatgctcgtcactcactttacgtcctaacgtaatgttgaaacgcaacgtatcatcaaacatgaatggcttttggttaacataggaaaaataattatgggcagcatcccaatttcccgttacatccgtaccattgatcaaaattttaccgtctttgggctttctcaaacctaatagcaagcgaagcaaggtggtcttgccccaaccacttggcgccatcaatagaactttttcacccggcttaactgttaagttcacattctcaaagatgcgtttgtgatcactacctgtaacataagataattgttcaacctccataccatcaaaatgatcgatcttctgcttatcatctttcagcacgtgatgcaaagcgcgctgggtcttttcccacattggcacagtcgacttgacttggttaaattcgttaaaaagagtcacgattggcgtgataaagttcaaggccaaatcgaccatcattactaatgtacccacctttaaatttccctgcagcatcataataccgccaatagtacatggtacgatgaagcaaaacaattcagcagctgaataaattaattctagtgcccaagcttgagtcaacgtcatattacgcagagcgttctccattgcctgggccgcaccagctgctcgtgtaacgatgttggtgcgcacgttataaagcttggtagcctgtgccccatttaatgaatcggacacattttgcgtatagttagcgttagtcgttgcccaaatcttggacttacgtgtaatgataggactagtaatcatttgaactaatgctggcgcaagcgtagcaatcaaaaatactagggtcatctgccatgaactataaaaagcaaaagtaattgccccgaaaaacgacaaaccttggaaaatcatatccaattgtgccgttatccgattagtttcaatctgttttaaatcgttggtcatcagtgataaaccgctcttgatatcaggctcaccttgatcaaccaaataacgcaagttagtgcgcttaaaggtcatattcacgtcacgaataatgcccatctttaccgtttcatagacaaagttactggccataaaacacatctgacctaaggcagtcaaagcagccaggcgaatcaaatgcagataatcatgcgatcctgacgaagcaacattcaacataatttgtaccatataagctacaaagacgatgttgcaggccttgattgcggccaaaatggtatagctaataatttggctttttttagcgtacttcaggctcattaatttctccttttctatcccgttagaaacattatacccgctagcttgtctttttctcaattagatacgataattagagtaatcattttaatttttaatgaaaagcagaaaggaacttttaatgaagactggtactaaaattattactttagacaacggttatcacttatggaccaacacccaaggtgaaggcgacattcatcttctagctttgcatggtggtcctggcggcaatcacgaatattgggaagacactgcagaacaattgaaaaagcaaggcttgaacgtgcaagttactatgtacgatcaactcggttcactttattcagatcagcctgactactctgatcctgaaattgccaagaaatatttaacctacgaatatttcttagatgaggttgacgaagtccgtgaaaagttaggacttgataacatttatttaatcggccaaagctggggtggcctattagttcaagaatacgccgttaaatatggtcaacacttgaaaggtgcaattatctcctcaatggttgatgaaatcgatgagtacgttgcttcagttaacagaagacgccaagaggttttaccacaaaccgaaatcgacttcatgcacgaatgcgaaaagaacaacgactatgataatcaacgctatcaagatgacgtacaaattttaaacattaatttcgttgaccgaaagcaaccatctaagctttaccacttaaaagacattggtggaaccgctgtttacaatgctttccaaggcgacaatgaattcgtaattactggtaaattaaaagactggcatttcagagatcaattacacaagatcaaggtgccaaccctattaacctttggtgaaaacgaaactatgccaatttcaactgctaagattatgcaaaagaagatccctaactcacgcttagtaactacacctgacggtggtcaccaccacatggttgacaaccctgacgtatattataagcacttagctgactttattcgtgaagtagaaaatggtacatttaagggcgaaaattaattaacagatattcaggctggaatcgatttccggccttttatttttaaggaaaatgatatggatgaaaaagatgtcaaaattctgctagttgaggatgaagaaagcgtcgctagcttcgtcaaaactgaattagaatttgaggattaccaagttgtttgggctgaagacggcaaaaaagcattagacctttttactcaagaaaagccaactttaattttgcttgattggatgttgccagtatatgatggcatgaccgtgttacggcgaatccgcaagcaaagtgatgtccctattattatgcttaccgccaaaaattctgcctctgatataagctctgctcttgatcagggactagacgactacctcaccaaaccatttgaaatcgaggaattgctggcacgaattcgggtagtcttgcgaagactggaaaaaatgcggcagcaaaatgacgtccctgatacttccctagaatttggcccattaaaaattgatctgcttaagcacgaattttactgtgacaccgagcaaatttatcttactcctaaggaatttgccttaatcactgaactaatgcgggaccccgaaaaagtcaaaagtcgtgacgagttgcttgatacagtctggggatatgactttgttggtcaaaccaatactgttgatgtttatattcgaactattcgcaacaagataggcaatccctacaaaaagatcattaaaaccatgcgcggcttgggctattgtttgagaaaattagatgataatcatgaaaaaagctgatcctcaaacaactacgcaacaattaacccgtttattcgttaggctatttgtcgctattttaattctggtcaatttggcttttctaattatttcatcggcctatatttattaccaagctgaacggcaaagtgaacaagttgttgaagcagtaaaagaaaatcttgattcaaaatatgactggtcggctatgctggatgcttatttggcaaaacaagacgatgatgccatcattttaaccacccctcaaggcaaaagttattactctgaaaatgctcacgagacctttaaacaaattaatcgccaaaatcattatcaaaacatggtctattccaataagcatatttacttcttacggacggaaaactcgcatgactttaaaatcaaggttgcattaaacattgatcgcttatttcatttaattatttggctatttgggacaatgattgtcatcaacttaatcgctattctgctgagcatcccccttattcgccgttttgcccacaaatggagtcgtccaattcaggtaatgaataatgaaattcaagaaatccagcaaggtgcttcaactgagcaaatcacagtgccgcaacaaccattagagattcgaaaattagcccagtcttttaacaatctgctagcttttcaaaaacaggccttacagcgtgagcaacaattcgtcagtgatgcttcacatgaactcaaaacaccaatcgccgcaattcgaggacacgttaatttaatcagacgccatggtcaagccaaaccagaaatcatccctaagtcactggattatatcgatactgaatcaaaaaagatggaaatattagtcaacgatttactcaccttaggaagaatcgaacgcaatactgaagtcgtcaaaattgatttggtaagaattattaatgaagtagtgtcagaaatacagtcagtttatccacaaaaaatacagactgacatgccacaagtattgaaatatcgtattaattcactagattttcacaacattgtgcacaacttagtggaaaatgcggcaaaatattctcctcaagacagcactattgtagttaaattagctaaaaataaaggacaggtctctttcacagttgcagacaacggaatgggcattgcgccagaaaatcgcgagaagatctttcaacgttttttccgtgaagacacgtcccactccaataaagttaaaggatctggcctagggttagcaattgtcaaagctgaagctgataagtatcatggtcaaattaaagttacggataatagtcctcagggaacaatttttacagtttcttttcctacagaaaaatgaagaaatcttcatttaaactctattaaatcttagttttttaaagctgcttagctagtaagataaatatatcaagttaaagcaaaacaaaaaattatcaatagtttaaaggagaacatattatgaagactattaacttaaagaaaattactattactggcgtagcattactcggcttaggaactgctgcaattaccgcaactaatttagctactgaacctaacgtggttcaagctgcttcaagcaaaattaaggtttcacaaaattcagctgttaaaaagtttaaggcaaaattcaaggcagctaaagtcgaatcaatcagcttagataaagaaaaaggccgttacgtttacgagatcgaaggcttcaattcaacgagagaatacgaaatgaaaattaatgccgcaactggcaaagttatctcatcccactccgaaagacttgatcgagacgagcgtaataaaaaagcattaaatctcagcaaaactatttctcgctcaactgctactaaaattgctcaaaaaagagtatctggcaaggcagttgaatggtcattagatcgtgaaggttcaaagaatgtttgggaagttaccatcagcaagaacggccaaaagagcgaagtaaaaattaacgcaattactaaaaaagtaatcagtgttgaacgggactaattgagaaaagaaggtatagaatagatgaaatttactaaactgacaagtattgcattattaagcgcagctttattaacaggaactgtagcatgttcaaaacaagataattcaactgctaaaactactacccaaaagagtgttacttcatcaaaggttacacataattctgaatcagcaatgagcaaacaaactcaaaaagataatattcaaatcaaattaagccagcaagaagccattgataaattccatcaacaatttagtggcaaacagcttaaaagcattgaattaaatcgtgaaggcaaacattacctttatgaaattgaaggattcgattcaaacaatgaatattctgttaacatcaacgcagaaactggtcaaattggacatgttcattcagaaaagttagatcatgatgatcgaaaccaaaaagctctagatttcaagggcaccattagccgcgacgatgctagtcgtatcgcagaagagcacattaaaggcactagcgaagaatggaaactagagcaagacgaagacactggtaaaacatactgggaagttaaggttaaaaatggtcatcaagaaaccgaagttaaaattaacgctcacaccaaagaagttatttcaactgaacatgatgattaataagattaagaacataaagaaagccgcaacattattctcgaagttgcggctttttattttgtctaatttttggataacttttttaccaataaccaatcagtttgaggatcgctaccaacttggaaagtatgctggctcactttttcaaatccatgacgcttataaaaatattgtgccggaatgttcttttcataaacgcctaaccacatgtaatctttgccttcttctcgtgctgtcttttctgcaaaatcaaacaaaacattgcccaacccgcgatgttgaaaattagtacgcagataaattcgttccacttctagagcattatcacgtaactgctcagtctgagcatccccaacattgatttttaaataaccagcaatttttcctttaaccattaaaaagtaaaaacgactattaggattttcaatctctctaatcaacttttccgtctgataatcttcctctaaaaagcgtttcatgtcatctggtgcagtataaggatcaaaagtcgttttaaaagtttcacgtgaaactttctgtaattctttcacatccgctgttgtaattgctttaatctcgtacttcatcaatatttcctctttccaccgttcttaaccaggtgccaattttcactggcattcttttctacaatttgtaacaaagcagctaattctgttctctgtttttgatctagtcctgtcaaaactatttcatttgaataagcattttctttttctattcgagcagctaatttatctcctaattctgtcacaaacaaatgcttaatctttttattctgctggtcattttctttcctaatcagctgattttgttccagttttttaatgctacgagctgccgtcgtccgatcaacattaagcatccctgctagatggtcagaaataattcccggattttctttaatgcgggctaaatacaggtactgacctcgattcaattgcatctctttaaattcaatattagcaatcgaatcaagtgctcgcgcaatagtgccaatttgacgcaaaatatcttctttcatgtttttcacctaaaaactattatatttaattttgttgtaattgcaacaataaaatataaaaactaaaaaagggatcgctccctttagttaattcatcaatttttctttagttcatttagatcgactacctgatcagctaactgcttaacttcatctcttaagtggtgagttaccataattacggttttatctttttgcgtcaaaatcaatctttctaattgtacgctagaagctttgtctaaggcagaagtagcttcatctaacagataaattggtgtatcacgcagcaatgcacgtgcaaaagcaacacgctgtttttgcccaccggacaactgtttaccttggtcagctaaaacagtatccatgccatcaggcaacttagcaattagatcctctaatccacattctttgatcacttcagaaatttttgcttttgaaacttggcgtcccaaagttaaattccaccctagagaagcagtaaaaatatatggatcttgctgcaaatatgtaatctgatcatgcaaatccttatctgaaatctggttatattccacatcagaaatttcaattttcccctgataatctctaagtaagccagaaatcaaattcagcagagtcccccatcagaatatatttatttttcagtttaaaatttaaattcaaattctcaaagataggcttatcttgtccagaatactgataagaaactttatccaattctagattgcttagtttaaaatcagcaggcaaagctccatcaacagttttaagcggtatagtcttaaatttttctataattggtttaactgatttgaattcttgccaattaaaactaatcccacttaattcagcgaaaattgtactggcaaaaaattgtgccccactgatggtcccgactggcgttaattgatgcaaaatcaaccagcctgtttgccctaaaatgataacttgactgataaaggctagaccattggtaatcgcctgagttatcccggctgttttactataatttagcgcatgttttttaacatcatcagaagcgccattgatctttttgacgattgtttgcggtaaattggcaagaaataaggtattgaagccattcaacacatcattaattgaattaaccaaacgttcattggcatgggtatattctaatgaccttttggccaaaattttagaaaacaaattgggaaccactcccataataattgtcaaaataatcacagtgaccacaaaactgacattgaagtacgccaaagtgagcataccgaaaacaatttcactgatttgtctaatgatcatcatgaaatcctcgacaccaaagttattaatggttgtaatgtcattggtcagccaagaattgtaagtagctaccgtttgttgatgaaagcctgaataactcgtctgtgatagatcttgcgcaatgtcatttctaattaatttatccacattttgtgccaaacgggtttgctcaacattgactagacagttaacaatcgcgtaaaaaatataggcaccgcccattaaggcaacccacatgaaaaaacgctcagcttttaattttgcaactgcacttaaagcattagcgctagatattccggctagtgtcaaaaagcctgcattaatgactattaaaaatgtaacaaataaaaattcccactttaatcttttaaaatattgcagtaattccattgattctccttatgagactgtaaaatagtttgtgtaaggatgaatgattccttaaatttatttctttaaacattagaaaaaggagttcctttctcgtatgattggtttgaacaaaaaaacacatacagaaagaagaactccttcatgaatgattttaccaaagattttgctcaagctctattcaatccagacaaaataaatgatttattgcgcaaagagctacaacaggctgttaataacttgttagaagctgaattgactgcctttctgggctatgatccctatgccagaaatggctggaatactggcaactctagaaatggtgcttatttccgcaaagttgatacgcaatttggcccaattgaagtgcaagtgcctcgggatcgcaacggtcaatttcatcagcacacgctgcctggctacaagcagcactcggatatcttggaaagcatgattatcaagctttactccaagggcgtgaccaccagggaaatagccgatctaattgaaaagatgtatggcagccattacagtccagctcaggtatcaaatatttccaagcagatgattccaaaggttgaggcttaccacaaacgcaagctaagcgacaagtttttctgcgtctatttggatgcgacataccttcctttgcgccgagaaacatttgagcgtgaagcagtctatattgccattggcatcaagcctaatgggcacaaggaggtcattgactactgcattgcgcctagcgagaacattgaagtctggacagatatgcttcaaaacatgaaatcccgaggcttaaagcaagttgagctttttctttctgatggtgttgttggcatgaaaacagccttggccaggacttatcctaaagctcattttcaacgctgtttggttcatgtcatgcgcaatatctgcgctaaagtacgcgtcgacgatcgtgaaaagatcatgaacgaattcaaacaggtgcatcaacagacaaacaaagaagaagccacagctgtcctgcatgacttctataccaaatggggcaaggtttacagccatgttatcagaagcttgaaagacatagaaccagatctgctggtcttttataactatcccaagcagatcagagcttcaatttattcgactaacatgattgaatcatttaacaatgtgatcaagcgcaaagctaagcctaaggcagagtttccaactgaacagtcgcttgatgcttttattggcattcaggcaatgagctacaatgaccgttatttcaatcgaattcataaaggctttggtcaggttcaggacaccttagaatcctactttgattaaataaataattaaaaaatcaatttacgagaaagatctatttacacaaaagatttgacagtttcctccttatattaaaaataattaaattaataatactatatttatgtatttgttcaatattttttaatactttacttaaattactgcaaaattaaaagggatcgctcccttttaattagtctacataagcatatttatatgaccattgcgtaccagcagtattatgaatgatgccgtgaactcgcttgttttgcaagtaagctgtggtctgttgataaatcggtgtaatagcctgattactatttacaatcttagctgccgaaatcagatcattccagcgtatgtcaggattattggcgtcttgattgccagcttttttaaccaaattatcgtactcagaatttgaccacttaccgtaattgtaagacgtacctgtcattggaatttgcataaatgtcatcgggtcgttgaagtcgccaccccaatgagagagataaatgtcaaagttgccttgatgtgctcgactggtggttgacttatcaggaatattggtaatatttatcttgattcccttcaattctttggtccattgtgactgcaaatattgggtcaattgatcactgtctgcttcatcatttgaagataaaacatcaaaagtcaaactcttttggccaatctcctgtaatcccttttgccaatatttcttggctagagctggattataatcaactgtatttttcactgcttgttctttagcaaaatctatacctgttttaggatttgcagccaaatcattggcaacaaagccttttggcagagttgagccattgcctaaaacctttttagtcacaatatcacgatcaattgataatgataaagccaagcgaatatttttattattcaaggcctttctattaactgcatttttatccttaaaattataaagcaagaaacgcactaacgaatatggatattgagtaaagtcattattgctcttcaagtttttaacttgctcacttgaaagtggagttaaatccaatttgccctgttgatacaactgataaccagtattgttagacttaactacttgatagtgaatcttgttcaacttgactaccttcttgtcccagtaatcattattcttaacaaatgaccaggtatcattagttccattccatcctttaatcttgaaaggacctgagtagacttggtactgagccttggttgcgtatctattgccatactttttcacaactttttcgttttgcggcccaaatagtggataagccatcaatactctaaagtaagcgatcgggcgatttaacttaaccactaccgtctttttatccggtgcagaaattcctaatgcattaggtgatttctttcctgcaatgattgcgtcagcattcttcacgccactaaaaagataggcatacggagaagcggtcttaggattcaagcttcttttccaagaataaacaaagtcctgcgctacaatcggatcaccattggaccacttagaatcacgtatcttaaacgtccaggtcttaccatctttagatacggtcccagttttagctaagccggctgttggcttaccatttttaccaagacgataaaaactttcgaatacattgccagtttgaccaaatccggtagacttactgatatcaatagtatctagtggagctgtggtgcttaaatttaaagtgccactttgagctgccgacttactactgctattgccattaccacatgctgcaagaagcattcctaatgaaatagtaacgactcctgctaaaactccctttagtttcgacataaattttcctttctcaaacaaaaaaatgggatgtactccaacacggaatacatcccattaagaaccacaactttttaactagttaatcagtaatagtcttaagatgaatcaccacatcagagcatgtcaaataaatgctgtttgtacaacaacattcagtgtattgacattgcatttgacgcttaaacatgtgattcatcatccttcttacttttgataagaataatcataatttattcgatcacgattgtcaacaaaaatctattgtataattatagaaaaatatttggagaaatttttatggaaattataaaatatggtccttacactcttttcacacttattagaacaatcctaacatttatcgtggctattgagcatatcggtatctgtttcttagaaatgtttggtaaacctgaacaacaagctaaggcttttgacatggatatcaattttgttaaacaagaagctgctcaagtttcactagctaaccaaggcatctacaatggtatgttaggtgtaattttgatcattgctttctttattttccctatccctattctttttaacgtatggaaattaattctaagtttaattgtcgtagtagcaatttacggcggattcactgcaactaagaaaatctttttagtacaaatgctacccgcacttttagcattaatttttcttttcatttaaaaatattgcatttttgtagcaaaaaacataagaaaattcaaagctcctagtgataagctgtcaccttgtgattatgtaatatataatatcagtaaacatatagaacataataacgaggtggaattcatgagaaaattttttatcattatcagcagcattattactgggttacttattgggataattggggcaacgatctatctaaatagtcaatcgtcaaaggtaagtaactttaccattcgaactactaatttaacagctcaaccgaaaatgatcagctattctagcaataacctgccacagattaatctctcacaggattccgccgttcagaaattcaaatcattatatacacatgcagtaggtcaactaccttagactgaagtctagggtttagtggcttgttagcttgcgctaaccagaacaccaacttgcttagatacggatttgacttaccagcagtaatcttttgactattgccgatagaggtcgtctaattaccaaagccttttaagtccgcgagttgctagcggactgcagcttttctaggctgcttcttttattttaggattctgccacttgcctaatcctttttctaagatgttcacggccgcattccaatcacgaatatgatgcatctgacagattgggcaagtccattcccgatccttaagggttaatttcttataaccgttttggcccataatactgccacattgatggcatctttgggtggtgtacttaggatcaattgttagaaattctttgccatatagatatgccttataagccagcatgttcaggaaactacgccaaccaacatcagaaatagcttgagacaaggcatgattcttaagcaggtttttgctccttaattcctcggcaactactaaatcgtggtttttgattaatgcagttgagagaacttgtaagaagtcttcacgctgtctgcgaatcttgtcgtgcagtctggcaactgataagcgctgcttttgatagttttttgctagccgcaaattgcgtccttcttttttagcccggcgctgcctgcgagataatactcgttgagcacgagccagcttctttttggctttgcggtaaaagcgtggattagcgaccattgatccatttgaatccgttaagaaattatcaaggttgagatctattccaagttgactctgcgtcttaggcaaggctttaacaaaggcaatatcgctgcctaactgcattgataagtagaattgctcgtcagcggtcttttttatcgtcactgtcccaattctagttgagatatgattaagcaagcgctctttaatcagttttctaaaaccagcaatgcggacaacgcctagcttaggcaatttaatatgcttagcatcaataaacctagctgtcccgttatcaagaaaagcttctggctgcttaggatattgacagttggtctgatatgaccagtcgctgcgttttttatggaaagttgggattccatgaccaatcttacgatagttgttccaagccttctgataattttgaatggcattggcaagagcgaggctatcaatttctttaacacgcaaaaagctataagtatcgcggatattctttggcttagccaatagttcgctattagtgactacttcttctgccaacctagtctcataattattaagaatagaaaaggcaaaaggcattgcttgatattgtctaacagctaagtagcccttagcatgataattacttcgattacgtcctacataagagttgtagacaaagcgctgcgcatcatagtttagcttaatgattttcttttgcttagaactaggataaaagcgaagcttaacgccaaaatgataggctaaactgctcatttttttcatgtgtttcacctcctcgtattatataaattgtaattagtcatattgtgataattaatcaaattagtatttgctttttgatcttcacatgttagcctctaattgtcattggctttggtcaactggtctaggttatcacctcctgcagttttgtctgctttataagtctgccacccagacagttcctttatgctctaactcacatgctgtattgattgcttctttttgctagtccttgagcaattgggattaggtgcagctttcaaagaagcaaccagtgaatacttatactggcgagattgaacttaagaactgtaattaggggttaacatgtgaagatcaaaatctatgatcagaaatttgaaagaaaggaggccatttccaatgaaattatttgtcggtattgatgttagttctaaagatttacaggtcgttgcacttgattcagaagatcaaaacaaacgcttaattaacgatagctttgtcaatgatctttatggtgctagtgaactgaaaaaacaaattttagatctagctcaaaataaacactatgatcaaatcattattggcatggaagctacatctatttacagttttcatcctgcttactttttccaaaatgacgaagatttacaaaagctcaatgtagagactgatgtaattaaccccaaagaaaccagcaggtttcataaagtctttgaagaaagtaaaactgatcctctcgatgcttattacattgctttgtatctaagctttggacattatcgagtaagcattgccagacaagacaactatcttgctttagagcgtttaacgcgtaccagatatgaattagttcaagaactgactcgtaccaaacagcacttcattgaagctttatattatcgggttaataaactaatcactgtcgataaagataagattaatactcctcttttcggtgctacaatgatgtctattgtaaccgatagtaaaactctggatgagatcgcggatatgcctaccgaagacttaatttcttacttacaggttaaaggcagaggacgcttttccgatccagataccttggctaaagcaattaagaaagctgttagaggttcatatcgcttaggcaaagtaatgactgattcaattgatgcagtgctttctgttcattacaacatgattcaaagctttaatgaatctattaaagatctagaaaaagcaattgatcgtatcgttgatgcattaccagaaagcaaaattctggaatcaattcccggtattggcaaaacctatacagctggtattatcgctgagatcggaagtatcgatcgctttgataaagaagaacagctggctaagtatgccggcctaacctggaatcaatatcaatcgggagatcacagcaacgaacatactccaatggccaggactggaaacagatatctaagatattacttgattgaagctgccaatctagcaagattacatgatcctgttttcaaaaaatattaccaaaagaagtatgatgaagctgtctactcgccgcataaacgtgcttgcacattaactgcaagaaaattagtacgagttatctttaaattgctcaaagatgacaaactgtacaggacaccgaggtcttaatttcaaaaattggtctaaatttaaaagtaaacaaaagtttaacattaaaaaaatcaacctttaccaaggcttagtttcatatactcaaatttatgatcaaaaagaacaaatatcatcgcctttcatttgacttattaccacatgactcatagattagatatttatattttacagggaagtcgaacatatgtctctattttttaataaaaaagctgactgctaggtcagcttggtcctatccatccccacattaaaatacggggattttcgggcgtttttcattaaatcgatcacacttagtttaagtaaagatatctatgtttatgacatagtaggctatgatgaccgtaaagactgtactattcaagttgacgcaactaataacaagattctaggtcagtctacgcaggtgcttgattatgactacgaaaaagatgcgtctttgaacctaaaaaagacaatttcacgccaagaagctaatgaaattgccctaaaagaattcagtggaggaacaccgatttcatgggaattaactgatgacaataatcaatcaatttgggaagttaaaatgatccacggtaaacacaaacataccgtaaaaattaatgctagaacaaaggctgtaatctaaaataatccccaacttatgcacaagttgaggattattttcttatcttttatctaggttgactatctgcacgtgacttgtaatcaccgttttcagtaccaataattagcttttcgccattcttgataaaatcaggaacttgcacaactaagccagtttccatagtagcaggtttaccaccaccagctacagttgcacccttaatctctggttgtgtttccttaacggtcatttcaacagttgatggcaattcaataccgataatcttgttatcatctgtaaagtccatatcaaccataatgttaggcatcaagaacttaacgtcatcacccaattgatcagctgaaacttcatattgatcataagtatcagtatccatgaaagtataagtattaccttcgccgtaaaggtattgagcctttttcttagttacttcaactaaatccactttttcagttggacgcatggtcttgtggacaactgcaccactcttaacgtcacgcaaatccatttgcataacggtattacccttacctggcttatggtggttagcctttaaaactttgatcaatttgccatcttggctaaaaatcataccttttttcaaattaattgcttgtaccattatttcttctccctttaatttaaacttacctttcgactagtttaaacacgctggaggcaaagcaaatttttttatcaacagtaaataaatcgtattcataatacctagtataccaaattagatgtgccgcaggtatatccgatcaatcaaatgtccgtcagtcttatgcaaaatcaggctagcacgttccttggttggcgcaatatattcacgcaagttgaccagattaaccatctgccaggtttcttcagccaattgaattgcatcttccagcggtccattagccattttatagtaaaaattatctggcttatttttatttaatttaagtacttttctaaagcgttgcatgtaccatttttcaatcaaatcttcttcagcgtcaatataaattgaaaaatcgaaaaagtcactagtcacaacttgtccactctcgggcaattgcaatgtattaattccttcaataatcaatacatcaggattttttacatgaccatatttcccaggtactatatcgcttaattcttgagaatatagtggataaacgatatccttctttccacttaaaacgtctcgtaaaaaatcactgagcaaagtcatattgtaactttcaggaaagcctttgcgaggcattaaattacgccgctttaattcctcattagggtaaataaaaccatccgtggtcatcaagtgtacctttaattctggataggttctactgagcaacaattgtaataaacgcgcagtggttgatttgccaaccgcaaccgaacccgaaataccgatgataaacggagctggtgaaaaacttttatgcaaaaatttgatttgtgctttttgcgcattctttttttgttggtaaactaagtgtaagtaactgatcaaactggtatagatctcatgcacgtcggttaggtcaatcacgtctcctaaagacttgatatcagctaattcttctttggtaatattgactttatctaagggagctaatttagcccattcatttctgttaaaactcgtataatttctcatatatcgtatccatattccttctaaaacactaacttattataatagaaagcgctaaaaatatgaaaaaaataatcctattcggcgattccatttttaacggatatcgtaatggtcaaaatacaaacctagtaactaatttatttcaacaggcactaattaattatgcacaggtggaaaacatttctaaaagcggtgctaccacagttgaaggcgtcgattatttggagcaaatttccccagaacatgatctagttgttgttgaatacggcaataacgatgccgcaacagcttggggcattagtccagaaagctacgaaaagaacttggctcaaatccttagtgcagtaggcaaagccattgttgtgggattgtgcaatcccaatccagaaagtgacatttttcaatattatggtgctgaaagactcgatctttttaacaatatcgcccaaaaagtcgcaaaggcacatggtgcacaatttgtggatattttacctgcaatgagaaacttaaaagacaaatcgacatattatcaagccgacgggcaacatttaactgatcaaggaaatgagtttttagttaatcaaatcgtgccagtaatcaaaaaagacttagcctaagccaagtccctcttcatcatcacatgttctacgccgccttcatcaaacggttcgcctacaacttgatagcccaagctatcatagaaaggctttacccgcatttgggcgtgacagtaaactgcatcaatcttattttgccgtaaaaatttatgcacagctgtaatcattttcgatcctagctgttgtccgcgcgcttcttttgacacagcaacgcgtcctagcatccatttaccatcttcttgaaacagacgacaagtcgctaaggcagtcgtctgtttttgattgagtaaataaacctgaacagcaattaggtcctcatcatctaaatctggtagagttatcttctgttcagccacaaaagtcgtgttgcgcaatctttctacgcaatagaattctctagctgtcatttcatcaatctttttaaaagtaaaattatctatcttcatattacttgcctaaccaactattgtttctgccaaaccatttttcattaagtttacgcaattgaccatttttttgcaattttgctaaaccttgattgaccttctgacgcaaagttttgtctcccttacgcatccccacagcgaacaagtccattggcacgcgatcattctgaattaccttgtattcgctacttttagccatgtgagcaatataatagtcggcataaacttcatctaacagaattccttgaattcgtcctgcattcagatccaagaacgaattagaaatcgtatcatataaaactgttttcttagcatgcagcacatcttgtttagtttcataccactgctctgctgttgaaccagtttgcattcctaattcataattcttcatttgtttaaatgaactaatgtcactatcttttttcacaactaaaacctggcgattacgtaaatatggcttgctaaaagctacttttttctgtcgttctggcgtaatgctgtaaccattccagagtaagtctatcgtaccgttacgcagctctgtaacgttcattgaccaatcaatcgtttgaaaagaaaccttaatgccatattgtttaaagactgccttagctaagtcgatgtcataacccgtcaattggccgtttttcttttcaaagcccattggtacaaaactatcgtctaagccaattaccacttgctttttgctggcaatcttattccatgtatcttgagtattagcttctttttgtacgctttggcaaccagttaaacataatgttaaggccaagacgatacctaaaatccattttttcattgcctaatcctcgcttaacggtcgaaccttgagcatctgatccgccacattctctgcaaaattcaagtcgtgggtgataatcagctgggttaaacccgatttttttaagcttaaaatcattttctcaacttccttacgtaaatttggatctagcgcgctagttggctcatcataacaaagaatccgcggtttcatagccaaagctctagcgatagctactcgctgtttctgcccacctgataactcataaggatactgctgttcacggccacttatttgtagacgttttaacaatacacgcgcatcctgctctgcttcagttttactcttttttaataccaaagtaggtgccaaagtgatattttgtaaaacgctcaaattaggaaaaagattataatcttggaaaacaacgccaaccttgcctgaatcataaggtttaccgtcaatcaaaatttcaccagaatcttttgtttccaaaccggcaataattcttagtaaggtggttttccccgctcctgatggacctacaattgtcataatttctccgtctttcaaggtaaaagagatgtcacgcaaaattcggtgaccgttaaattctttgctcaaattttttacttctaacatattctcacctcaactacttgtaataagaaaagtatttttccagctttttcaaaacaaaagcacaaatactgatcaacagtagataaattacacctactaaaactaacggtactagcgttacgtctctggccattgccacattgccggccctaagcaaatcacctaaaccaatgacataaactagcgatgaatcctttaccaagttaattacttcatttccaattgaaggcaaaacaatttttattacctggggaataataatcttggtcatcgtttgccagcggctcaagcgcaaaactttcgctgcttcaaactggccttcatcaatcgattggaagccgccacgaaaaatttccgcaaaataagccgcataattcaaaacaaaagcaaacaaggctgcttgatagcggggaaagacgatatgaataattggtaagccataaaagacaaagatcaattgcaataataagggcgtgccccgcataatccaaacataaaagttaaccaaccagcgtaatggtttaaacttacttttttcacctaatgagaccaaaattcctaatggcgttgctaaaattaacgtccagaaaaaaatacttaacgtcatgcctgctcctgacaaaagagcgggtaaaatttctgcaatatattttaatgacatactctcaccttcatttttctttcctaataaaaaagccctcttaggattaacctaagaggacgactgctcgtgattccacctcatgttcgcacctgctcacgcagaaatgcctcactaggttgatcattttaaaagaaaaaccctcatagccaaacggctacgagggcgaatgtaatcgcggttccacctcatgtttacaaattgctcacgcaacttgcctcaataagttcaataatcaacctttagctataacgggctatcccggattttcctacttttgttcagaagaccaactcacagatgtgattcatactagcaaatatcttatttccaccagcaaagactctctattactttgactagtattactatttctgttctaagttgtttttaatgttgaataaatcttaaatgatctagcaacttttgtcaattatttttcttcataagtatctggatcaacatcaagcaatggactcttttctccagtataaataatatctagcttatacattgcacgagaggtaatagtataaacaagttgagtttcatccaatttatggtaagcagctttagaggcatcccacatgactaccgcatcaaattctagtcccttagccaagtaagaaggcacaactagagtaccatcaactagtcgctgattagcagtcgcaattaaggtcgtgttttcaccttttttagctaattcttcatgcacaaatttagctgcagctaagtctttggtaataacagctgtcgtacgcttattttgttcattattatgcaaaacgttaactaaaacatcaattgcttcatcatcgttttttctgccccaaattataggcttaggacctttacggttaaaggcttcaatcttttcgccttgacgcaaaatttgcttggtgaaattggtcaattccttagttgaacgatatgatttcgttaattgcaccacatcagttttttcaggatcaaataagccagagatctgcttaagtaagctacgactttcatccttagtaaaaatagcctgattcaagtcacccaacattgtaaacttggcccgtgggaaattatacttcaagtaagctaattgaaatggagtataatcttgaatttcgtcaatgaaggcataacgcatctcaaagtcagtcctgcgaccagtgatcatgtcatacaaatataagtaagctgaaacatcattcatggcaatatggtgctgcttaaagttattcttaacttcttccacatgagccaaccaatcattttcatcaatattccacttagatagatcaaccatcttaggtacagctcgcaaaaagctcaggtattgtgctcgcatattcaaaaagtggttgtgcaaaatacgcttatgcacgcccttcaaggctgataatacaatttttctacctaaaaaggcctcttccttagcctcagactcaaattcttgatcaggtcgatcatataactcatttaattcagattggctcattccttcaatagcgtgtgccacccaagccttcttagtttctggcgtaatctttcgattcaacatcttgatcaattcttcacgcgttgcatcaattcggttggccaacttgtaattttcattgaaagaataatagatctccttaattttttccttatcaaagtaaggtttcttcttatcacggaaataaatattcttaaaaataacaccgcgcttattcaagtgctctgcataacgagtcaacaagttaaagaaattaactgaatccttaaacttagaaatattgctgtctgcggtttgatcttcaaactgtctgaataagttttcaacttccatacctggcaaccgtcgcgcaacaaactgccagtaagtcatttgaaccatattttgttcgcccatttcaggcaaaacattcttaatatagtcattaaacaactggttaggactgaacatgattacatcacttgaagtcaggttgccacgataacgataaagcaaaaaggctatccgctgcaaaatcgcactggttttaccagaacctgccgcaccctggacaaaaagcagatctgctttggtgtttcgaataatcttattttgttcgcgttgaatcgtcgttacgattgacttcatctgcgttgatgatttttctgacaaaacttccaagagcatttgatcaccgattgactcatcagtgtcaaacatgttcacaatcttgccatcttcaatcataaattggcgtttcttagtcatatcaactgtaatttcaccttcaggcgaattataagaaactttacccaatttaccatcataataaattgaagatattggtgcccgccagtcatagatcaagaagtgatcgtccttgtctgcaaaagaacctagaccaatataaatcgtctctgttcggtcctcatttttttctttaaaatcaacccgagcaaaatatggtcgcttctctaaacgctctacagtctctagctgcttagctgaatgttgccaagcatgttcacgttcactcaataattgttgctgctggtggattgacagtgctgtttccattgaagtggaataaccatcataatccaatttaacatcgtcaaaaaagtgtgaattaagctctcttgcttcgccttcagctgatttgatagatttttttaaagttttttcgcggtccttgatctgacccataatattatcaaggtgcttttgttcaagttctttttcgtttttttcagttttggctgtagccatctaatcaccttttctttaaaaattcgcataccattttaccatgaatagcgctttcataatagttttcctgctcgtgagaaaaatataaataaaaattgatgaaaactttaactttagagactataatcttgacatattggggtgatatatacatgaaaagattttttaaattactgagaaatgttctcttgcttgctcttatcgctcttggcgtttggacttatcagaacaatcccaatattcgtatcgcaacgcaagactccctagctacacttagctatcgaattaacgaacttctaactaacgaaacgaccatttctcccaataacgaaaaaaagactactaatatcaaaactgacacagataaaacagaaaatgacgattcttcagacaatcgtgtatggtcaaatcctgaagctaaggtttatatcgatattagcaataatgctcaactaagatcagctgcagtcaatgcaatgaacgcttggaatcgtaccggtgcttttacttttcaccaaataaatgataaaaaagacgctcaaatcgtcattaatacagtcgataatagcgacactaatgccgcaggagaaacagcaactacctataaccctgctacaggacatttgttaaaggccacggtcaacttgaaccgttactatttgcaaaacgaatggtatggttacagttacaatcgaatcgttaatactgctgaacacgaattaggccacgcaattggcttaaaccacactaataatgtctcagtcatgtacccaaagggttcgatctatacgattcaaccgcaagatattaaaactgttaaaaagatctaccacgaaaataattaactttaaaagctcacctcttttttctacaataaagtgtgagctttttacgaggagaaaaatatgaaaagaatttatatcgtccgtcacggtcaaacttatatcaatcgctacaataagatgcaaggttggtgtgacacaccattaactacaccaggaattgaaggcgctgaagaagctggtaaagctttaagcgaagtaccttttgacattgcattgtctagtgatcttaagagagcaagtgatacctgtgagatcatcatgaaatataacgccaacaaagacgaattgcagcacatcgctagtccatttttcagagaacaattctacggctacttcgaaggaatggattccgaaatggcttggcgaatgattggtggcagtcacggctacggaacacggcaagaaatgtttgctcatgagagcatcgatactattaaggattggattaaagaagccgatccttatcaccaagcagaaaacgctgaagaatattgggctcgtcttgatgatggttttaaattaatcagtcaattggatggcgctgaaaacattctgctagttactcacggcttcactattagaagtctctggtatcgttatggtgaccatattcctttggttccaggtcctaagaatgcttcaatcactattatgacaatgagtgagaaaggcgaaattaagatacctaagtggaatttaatgcatttatagcaaaataagatcaggcgaatcgggcctaatcttattttgtttgtttcccggatttaaaattgaagtgcaacactaagtgttaaacaaaaaggccatgaagacctaaacttgaagtgacgaaaaatcaagaaaggaagatcttcatgaccaattcaaattctagcatttctaagcactatcatcaattaaccagcgtacaacgtggacaaattcaagcaatgctggattccggcataacttcccgtactgttatcgctcaagaagttggctgccataagtcgacaatcagtcgcgaaatcaaacgcggaagcgtcctgcaaagagacagcagctatttattgtatgagcactattacgctgatactgcacagatttattatgagaagcgtcgcaaaaactgctatcagcgcaatccattgaagcattatgctgtctttttgagaatgctctccagacgctttaaagctaaatttgatgccaccagcatcgatgaattcgttggtgaattcaaaaggactatgccaggctacccttgtcccagcacaccaactgtctatcgctatattgatcagggcttgctggacataagcaatattgatctgcctatgaagctcaaaagacgcaggaacaagtgtcatcacggccatagcggtcatgctttgcacaagaagcatcttggcaattccattgaacagcgtcctaaagagattgaagacagaaaaacgccgctgcactgggaaggagatctggttaaaggcgtcagacgcaagaatcagcctgctttaatgactttgaccgaaagaaccacacgctttgaagtagttatcaagattcctgactatcgggcaagcacatgccaaaggctgcttcaaaatgagattgacagacatcctgcctggtttaaatcgatcacgtttgacaatggctctgagtttgcggatatgaccgagatcaaaggctgccagatctacttcgcccacccatattctccatgggaaagaggcaccaatgagaactgcaatggacttctgcgtcaattcttccctaaaggcaaaagcatgaaagataagtcagctgcttatgttcaacaggcaactgatgccattaaccgcaaacatcgtcgaatccttcaatatcacacagcagaagaactcttcaagcaatatatttcctcatagcctaactgttgcacttaatttgacaattcaggattttgtttgtttaattatttttgcaaaacaatatttttatatagcttcactgttattaaaaaacttcctgaaactgtcaaatcttttgtgtaaatagttctttctcgtaaattgattttttaattatttatttaatcaaagtaggattctaaggtgtcctgaacctgaccaaagcctttatgaattcgattgaaataacggtcattgtagctcattgcctgaataccaataaaagcatcaagcgactgttcagttggaaactctgccttaggcttagctttgcgcttgatcacattgttaaatgattcaatcatgttagtcgaataaattgaagctctgatctgctggggatagttataaaagaccagcagatctggttctatgtctttcaagcttctgataacatggctgtaaaccttgccccatttggtatagaagtcatgcaggacagctgtggcttcttctttgtttgtctgttgatgcacctgtttgaattcgttcatgatcttttcacgatcgtcgacgcgtactttagcgcagatattgcgcatgacatgaaccaaacagcgttgaaaatgagctttaggataagtcctggccaaggctgttttcatgccaacaacaccatcagaaagaaagagttcaacttgcttcaagcctctggacttcatgttttgaagcatctctgtccagacttcaatgttctcactaggagcaatgcagtagtcaatgacttccttatgtccattaggtttaatgccaatggcaatatagactgcttcacgctcaacgctcaaacgtttctcggcgcaaaggaaggtatgtcgcatccaaatagacgcagaaaaacttgtcgcttagcttgcgtttgtggtaagcctcaacctttggaatcatctgcttggaaatatttgatacctgagctggactgtaatggctgccatacatcttttcaattagatcggctatttccctggtggtcacgcccttggagtaaagcttgataatcatgctttccaagatatccgagtgctgcttgtagtcaggcagcgtgtgctgatgaaattgaccgttgcgatcccgaggcacttgcacttcaattgggccaaattgcgtatcaactttgcggaaataagcaccatttctagagttgccagtattccagccatttctggcatagggatcatagcccagaaaggcagtcaattcagcttctagcaagttattaacagcctgttgtagttctttgcgcaataaatcatttattttgtctggattgaatagagcttgagcaaaatctttggtaaaatcattcatgaaggagttcttctttctgtatgtgtttttttgttcaaaccaatcatacgagaaaggaactcctttttctaatgtttaaagaaataaatttaaggaatcattcatccttacacaaactattttacagtctcaacttcctactatttttaacagtaggaagtcttactctaactaatctttagtcacttgttttagtttttattaacttacagtcgcccaaagtctgaatcaattgtttgccatctttttggtggaaaacagcgttttgatacgacaatcgttctttctttttactcttatctttatactttttaataaaggttacttcatagttaatccgactataattacgcttacctggtaaaacagagagcaccttgatctttacacttaatttcttgatactcttctttttatgccattcctttagttgcttagcaatcttcttatagtctgcattttcttttccattttcaaagtcatctgcatttggcgacttaagggtgttgtacaatagcttagctgcatccccaaccttaatcaagccaggccaaatcgggttaacaatatagtcaccttctgcatcctgatagacatctttttcgccattgccttgatattcagcagtaccatcataatcagtgacgtcatcctcactattagaaaattctgaactaatcgactgcgacaaatccgttaccctttcggacttaatagtttgaccatctgccttactcttaatatagatttccattcgcttagcaatcggataatccttgaaagtatagctaccatgctggttcaatttacccgccttacgatcattgatatagatcgtaccattaggaacgctgcgcacttggaaagtggccgttttgatcttcatatcaacagtcttatctgaccaaatgttaacaatcgaatcagcatctaaatggcgaccattaaccttagatttaactaatatatgatagcgaccaggaaagaccatacctaaatcttgatagtaattctgattgccaccttccatttcaccataatccttttggttaaccgtcaaagttgaattagcgtgattggtcttcacctgtgggcgatatacttgtatccacaacttatattttggaaaaagcaaaaaattgcgtccatcttgaatcagtctgatttcaccatgatcgcgattatgacgcaaattataggctaaacgtttagctgcactgtgatgctctttaaagtaattttgaagcggcttcagcgatttatctgtcacatccatatcaggcgttgaagccgtgacatactgagctagctcagttttaggatcctgcattttagctacaatgcggtcaatttgacgttctttagtgtaataaaaattgccaattagccatgcaataccaattaacaggataataactcccgatatccaaattttcttatgttttttcattgatcaaaacaccttttcacaaatccttttaacttagattaacaagttgatcaaaaaaagcaaacatcttttgttcacaaatcaagacgaagttcttattatatttagtagcattattttattttggaggggattgcacagtggaagtaaattttgattttgtaaaaaatagcagcttcaaggaagcctttcctaccgctgaaaaaatccacaaattatacacaattgatgattatcgtgacgttatttcaaattcacgtcttctattagagagtctaatcaaaaaaatttttaagttagaaaatctcagtccatattacacagttcatgatggcgaacaccgtaatttgcgtaataatacacattatttacgcaatgaactagattaccctctttcgatcatggatttatttgacgaaatacgctgcatgggcaacgctgctgtccacgataaccaaattgaaccagatcaaaagcaagcctggcactgtatttgtgatttacacgatattcttgtctttttaattaacagctatgacggtcaagacctatattatttgcgtcccgatattgcgatggaagcacaaactgatgaagaccattattatgtgcgccaaaataagcaaccaaaaataatgaaattgcatgatcatcaaaatactaagaaaaaacagtccgcatctgcaccaaaaaaggcgaaacatgttaaacatttttccagtaaacagcatatagagcaaactaactctgagtcacaaacgaaaactactccttccactaaagacaattggttaagaaaaattaaagaactctttcaccatgattagtcatattgacactatgtcacaatatgataaactatatattatataatttacataccgagaagcgcctatgacgctgccgatacgcaaatgaaaactgaacaagtttctcaaatggggaacggcttatgctagtaggtcgttttccattatttttttacgaaaggagtggttagtccgctatggataatcacaggcaaaaaccttgggctgtcgaacagtctgaggtattaacaaatacaaaaacaaccgaaactggtttaactgaagacgaagttcgaatacgccagcaagctggtttaaacgagctcgcagctaaacctcttaaaacagtaatccaaatggtcaaagagcagatttttgatccaatgatcggtatcttattagtagctgccctcttatctgctatgtttggcgaatataccgaagccattattatcgcgacaatcgtggttcttaataccattattggagtagttcaggaaaagaaggcacagtcttctttagctgcgttatgtgacatatctgcgccaactgcccatgtaattcgtaatggcaaagaattaatcataccggccaaggaattagtagttggtgatattgttaccttgcatgatggggacatggttccagccgattttcgcttaattgaaacagctaacttgaaaattcaagaagcatcccttactggtgaatcagtaccggtagaaaaagacgcagctgctgttttaaattcagattgtgctcttggtgaccgcatcaatatggctttttcttcctcaattgtgacttatggtcgtggtcaaggcgtcgtgacagcaattgggatgcaaacagaaatgggtgccattgctggcatgttagaagatcaaactgaagtacaaacaccattgaaacgcaaattagctaaagccggcatggtcttaacgactatcggcttaattatttgtagtttggtctttgcaattggtgctttctatggccgtccacttttaccacaattcttggttgctatctcattggcaatttcaattattccagaaggtctgccagcaaccgcgacaattgttatggccttaggcgttaaacgcatggttaagcgtaacgctttgatcaaaaagctgccagcagtcgaaaccttaggtaacgccactgtcatctgttccgacaaaactggtactttaaccttaaacaaaatgactgttacacaggcagcaacgaatgacttcagccaaagtcacgtagttgaccagcttgcagcaaacaaaaccaatcaaactttggcctatgctagcgctctttgtaacgatgccagcttgaacggtgaaaaagagattggtgatccaactgaggtagccttaattccttttgcccaaaagcttggctttaaccaatctaacttaaagaaagaattcccccgtttgttcgaacaaccctttgattcggacagaaaacggatgacaacattgcacaaaattgacggtcaattaacggtcttcactaagggtgcaacggacgaaatgttgccgttatgtacacacattatgactgacaatggcgtgcgtaaaattacaccccaagacaaaaagcaaattgcccacttgtctcaccaaatgcaagctgacgctttacgagtactaggctttgctaccaaaatagtggataacttacctgaagcaaatgctgatttggaaaataatttgacttttatcgggattgtcggcatgattgacccaccacgaaaagaagttgcagcatcagttaaaacctgccgtgaagccggtattcgcacaattatgattaccggtgaccacaaggtaactgccttggcaattgcgaaaaagttaaacatttatcagacaggtgacttagcaatctcgggaactgaattagaccaaatgtctgatgcagaattagatcaagctgttgaaaaggctaccgtttttgctcgcgtttctcctgctgacaaactgcgcatcattcaaagcttaaagcgaaattgtgaggtaacagctatgaccggtgacggagtaaacgattcacctgccttaaaggctgccgatatcggtgtcgctatgggtgtaacgggtacagacgtggctaaggacgtggctgatatgattttgcttgatgatagttttaccacaattgcgcacgctatcaaggaaggtcgccgcgtttaccgcaacatccaaaaagtaattcagttcttgctagttggtaacattgctgaaattaccactttgtttgcggcaactatttttaactggaatgcgccattattggcagtacacatcttgtgggttaacttagctacagctactctacctgcccttgctcttggcgtagacccagcaagtaaaaacattatgaaacacaagccagttaaagctggtactttattcgaaaaagacctagttattcgggttattacccaaggaatatttgttgccctgcttactttaactggttacttcattggtaaagaaaccggcaatcaagttgtcggacaaaccatggccttcagtattttagcattggcccaaatgattcgttcatttaaccagcattcaaatactgatcccatctggaaaagatcatctggtaataatccatggttaacagtgtcattcattatctctgcatttttcatgggtattattctctttgtcccagcaatgcaagatgcatttcacattaccagtttgtcagctggacaatggttaatcgtagttaccctagctttactttcaattgcacaagttgagttagtaaaaggttgggcaaagtttagaaatatttttattaatgacaataatttaattgaagattaattagttacaaaaagacggtagtacaacactatcgtcttttttgatattaaactttggctgctgccaattggtcaacatctatctgactacgaccaatctgaattgccttttcggtactttcattcaagctagcattgatcatcttatggctaagctccagcaccattggcaaattaacaccgctaattacccgtactcgctcaggatacatatcttcatattccgaagcgactaagtggggtgtcccattttttaaatcagttagcaccaaaatctgactattctgatatttattcatgactttagcaaaacgagccttaaaatctctgattcctgtgtcgtttaattcaattgtcaggatctgatcattcttgcctgccaacatatcatgtgcagacattagccccgcagccaacccttcatgagttgcaattaaaagttccataaaacgcacctctttgtaagcgatttctatagaaccattttaacatatttttgtattaattaagctgttcaatatctgctaataagctactttgttcaggtgttagccgctcatccttttgccgtaacttaagtacttgtagacaagtgtgcaaaatcttttttccttgttccgtcacttgtttgccatccatatcaggcgttacactggctaaaaagtcatccatctcatcagcagtaaccttgaaaacatcattttctccatgaatcaagggcatccgattgagcatttcttcaatcatttgtaatttatttctagcttcttcaaaatctatcttgttcacatccaattctttttcttttattatacaaaaaaacagccacctaagtgactgtcatctttatttcgtattaataattgcgtttgaaattgtagttgcattagattcgatcagttgatgtgaattattaataaaaagggaagccccaattcctatagcagcaaatacaagccaaactttctgtaaaactgtactcttcatgttcccagctccttatatttcttattatataaaaagccgatcgttatggggatggctacgcttacaattaacataattgtaatattatttacctttacttaagagttacttctccagcaacatttgtatcaaaaaagtcagcaatttgatggacgtccatcccttgccctaaagcccacattaatttggtaatcgcactctcagaagtcatatcacaagcagaaatagctccttccagtaaagcctcacgccccacctcatatttggtcaaatcgctacgttcatacaagcattgactgctggctacaacgggaataccttgacgaattagcataccaattgcggctaccatgttgcggcgaataaagttcatcccgcctagaccatatgcttcaataacaattccacggcaaccactattaaccatcgcaaaaagcagattaggatcaaagcctggaaatagtttcaccaacgatacgtgtgaattaattttggtattcaaggttggctgaccgtcatgttctctttgaaaatgttctgaattaaaaactaatccatcggaagaaacggttgctactggtggcacattcacactttcaaaagcatcaaagttggtagtccgcacctttacactgcggcagcccagcataactttattatgaaaggctaaataaacatcaggtggacaagttgctgcagctgcaaaagccaaccgtaggttatcgtgagcgtcacttaggaccacgttaattggtacctgacttcccgtcagcacaaccgggatattaatatttttcagcataaacgacaacattgatgccgtataagccatagtatcagtaccgtgtgaaacaacaattccatcgtaatcattgcggtatttgtagatattttctgcaataaatttccattcttctggttggatattagaagaatctaattgcaaaatatcgcggacttgaatgtcgtacggcaactttcccaacattttaattaactcttcaccggtttccttgggtactaggcctgcatcagaagcaacggaagcaatagttcccccagttgatagcaataatattttcttcatcttgttcccctttatctcaaatcacaatgtcgaccataactattcatgattagatcaattaaaacataggccgaactaaaagttaccgcattttgcttactaaattgaaatggcgtagttttgaagaaaaagctatagtcgctaagagaggctaattttcccgtttgccagctagtcagtgacaccaatttcagttcagtattcacgacatcaatcttcttaagttcttcaataattgttttattaaaaccaccaaatgaaataacaaacagcatgtcattttcccgtgcagaccgccctaataatgccacttcgtcgcgtgcactaggcaaaataattgcttttttaccaattaagaaaaagttatgcgccaaatattccgcgataatttgctgctgccagccagtagagtaaagatagatcgtttccgcttgatctaaatccgcaaaaaatggttgtaagtttaatcccttaaaatatttaaaagtttcagcaatgatcttttgtaaatccgtattgaaatctagcgtttgcttgttcttaacgttttgctcctttcgtgtagctaactcggacaattcaaatttcaattcgctgaaaccgcttaatcccaattttttgcttaggcgaaaaatagcggacttagaaacgtataatttctgagctaattccagcaaactcaactgacttgctacttcaggatatttcaataaatagctaacgatcgctttatcggtctcattaaaactttcctttttcttcatgaccgctgtttctaaatccattctgtttcctttctcatcactgtttcttattaagaaaagaatatcatgtcgtactcaaaaaaggtagccaccctatttgagtaactaccttaatttttattcttgaattgaagttatgttatgacaattaattatttaagttctggccagtatggagcattaactggaatcatgtcatccaaaatcttcttagcaacggaagcatctggtacagtcttgtttaatgcaaatgcttgcagcatcttattgtatgaatgttcaacataagcatcaacaaccaatttttcacaagtttgttgttccatcatcaagcctctttggaagcgacctgctttacccgtagccattggttgaatgccatcagcaccaaacaatgctggtacttcaacaattgaatctggatccatattagaaattgcaccgttattagcacagttagctaagaacttttcatgagtgttaaatgcgatcgcatgacaaatatctacgatatattcagagtgcaaacctgaaatatcccaaatattattcttagcagttcccacctttacgattctttcacattcgccaaagacaatcttttgccggtgttcacgaatttcatcagtacgagtatgcttcggatcagcattagcaacttcatattgtgggaagtagtagtattgcatgtaattgtttggcaaagtttctggctctagcttatattcatcggcaactttcttaaaggtggcttcccaagaagcttcagtatccttgtcgtaatcgccacctacccaatagccgtgctctttgacatattccttcaacttaggcattaagtcttcgccagtcttcttgttgcgaacttctttccaccagccaaaatgattcaaaccataatagttaaagtcaatatcatgccaactgtccaaaccacaaatggcagccattctgtccatatcatcaatcggcatatcacaaatgttaattaccttagcatttggacgaagacgacggcaagcttctgcaacgattgcaattgtgttggagtagttgatcatccaagcatttggtgagtattcttccatccaatcaataatttgcaaaattgcgggaattgagcgaagaccataggccattcctccgggtccagtagtttcttgaccattcacgccatattttaatggaatcttttcatccaagcttctcatgtgatatttaccaacacgaattgatcccataacaaaatctacatcagtaaaggcctctttaggatcagttgtgtaagaaaacttaatttgaggtgctctttccttcatgataatttcaacagctttggcaatcttttcttgccgttcagcatcgttatcatagaacttcaactgtcttaatgggaatttatcctgactcttgattaaatcaaggacaaatcctggagtaaaagtactaccaccgccagcaataactactgaatatttcttaccatccataatctattttctcctttaaataaaactaagtttttatctctgtttcatttgccttacgcatatatttatatcatcttctcccacaaatgtattcgttttcaccagcttcagactttgtttcaagttttggaacgcgtttcactacgcgaaatatttttaaattttgccttaagcctaacaaatcaggtgtttaacttgcctttattagtaatagtgtaaaaatgaaaaaaataatcgtttcatgaccaagataaactataatttgaacattcctttaaccacaaaaataaatagtccgtatttgatgatcgtatagttttaatgaaactgtcaaatcttttgtgtaaatagatctttctcgtaaattgattttttaattatttatttaatcaaagtaggattctaaggtgtcctgaacctgaccaaagcctttatgaattcgattgaaataacggtcattgtagctcattgcctgaataccaataaaagcatcaagcgactgttcagttggaaactctgccttaggcttagctttgcgcttgatcacattgttaaatgattcaatcatgttagtcgaataaattgaagctctgatctgcttgggatagttataaaagaccagcagatctggttctatgtctttcaagcttctgataacatggctgtaaaccttgccccatttggtatagaagtcatgcaggacagctgtggcttcttctttgtttgtctgttgatgcacctgtttgaattcgttcatgatcttttcacgatcgtcgacgcgtactttagcgcagatattgcgcatgacatgaaccaaacagcgttgaaaatgagctttaggataagtcctggccaaggctgttttcatgccaacaacaccatcagaaagaaaaagctcaacttgctttaagcctcgggatttcatgttttgaagcatatctgtccagacttcaatgttctcgctaggcgcaatgcagtagtcaatgacctccttgtgcccattaggcttgatgccaatggcaatatagactgcttcgcgctcaaatgtttctcggcgcaaaggaaggtatgtcgcatccaaatagacgcagaaaaacttgtcgcttagcttgcgtttgtggtaagcctcaacctttggaatcatctgcttggaaatatttgatacctgagctggactgtaatggctgccatacatcttttcaattagatcggctatttccctggtggtcacgcccttggagtaaagcttgataatcatgctttccaagatatccgagtgctgcttgtagtcaggcagcgtgtgatgatgaaattgaccgttgcgatcccgaggcacttgcacttcaattgggccaaattgcgtatgaactttgcggaaataagcaccatttctagagttgccagtattccagccatttctggcatagggatcatagcccagaaaggcagtcaattcagcttctaacaagttattaacagcctgttgtagctctttgcgcaataaatcatttattttgtctggattgaatagagcttgagcaaaatctttggtaaaatcattcatgaaggagttcttctttctgtatgtgtttttttgttcaaaccaatcatacgagaaaggaactcctttttctaatgtttaaagaaataaatttaaggaatcattcatccttacacaaactattttacagtctcgttttaattacaaaatacgactcaaactagtttcacttccatattttgtagtgtaattttgaaattaattataattttaatatctttctgctattttctatacaatataatatttttaaaacatatctttgctaaacgctgattttatcccaactcttagtcattagtacttgataatttacagataacttaggttataattatatattttttttatataaatttagcctttatcaaaaaactttcgaattatttattaaccgtatagtttttattttaggtcgccctaagtcttgataaactagtactctaaaaaaataacatccatgttttttatttaacacgatacgttattaaagcttttcatgtatagactttgtttttaataatgttagtatcattccatgaagagacatataacgagctttaaggaattgactactccttaagcaaaaaaatgacttataaattggaaatccttttcgtaatataaggggattaagaaaaatgacaaagaatgttaagctattatcacttatcggtatcgcagccgctttagcaggtggaagtgttgctatttcaaataataacaactctactgttcaagctgcttctatcacattacctgctggttacaccaagagtgccattattaaatggaaccaaactggtaaagcaagtaaggctttgattgatgcttctaaaaaaggcatgaaggaaaacaccaatagtgatgcgggttcagataatacgttagttaacgtgactaaattaactgcgtctcaacaaaaagaactgagccaatacactttaagcttaattaattctgcacgtcatcaacttggcaagcaaggctggacttacaaacgaggtgctttgcactttgcaaatcgtgtagctaacgaatactacagccataacagatcttgctgggatgccgaccactatgttactggaattgaacgcgcagctaaggcttctggccttaactcaaaagtaggtcaagtctacgaagatgaagctggcttacctatctcttcaacatacaatactaacttacgtccaatgtcagtattgaaaaaccaaatttactttaacgtaaagcaaatgctttttggcggttttgcaggctctgacagtcagatgaatgactcatctagatacactgaatgggaacacgctggtgatttacttggttgccatactaagagctacgatgctaagactaaatactttggtattagtttcagtggcttaaagggtgaccaaagcaaggttagtgttcacatgatgggtgttgctaaatgttacatccaaaactacagaaaattcaatcattaaaactaacgctgtagttaaaaacttaatacagtttcctaatccaagagctcaagtagttcagtcaactatttgagctcttttatttttgcccatttttcatcaaaatcctgtcaaaaaaatgcagatattcacacattttcaattaagctatctaattgtttgtatacattagctaatactaatagtgtgttaagttattatcttattactattttgtctataatccttgataaatcaatgtttccagcaataactgtacataattaacaacagtacagcaaattatgattacaattaataaactttttcaaaagcatttttacgttatccatgcgggattttcgcttacacaatctattacattattgttatctaaaaaaaggattgctatattaaatagtaactggtatattctatatcaatatgttcaatgaacataaaaaagggaggataaagatgtatttcactactacaagaagaaaaactaggaaagacaggatacatatccaattctttgcacaagtcttaaaaaaagacctatcacaaggaactgtttacaagtattcagttcaaagattctgtgaagctgcaaatatctgtcgcggaactttttaccgcaactttaaaaatttgaatgatctatttagtcaagtactgcaattcgaaatcaattcttgcttcaacaatccccaatcaagtactttacataaaaaagcacacaacttactgatagaaattgaaactaatgccacctactatcgaaatgtacattctcttgcctcaagtcaaattcgaacacaagttgaccaagctctttttcgtgaaatgcaaaaattgctattcaatagtaatctttctaataagcatatccaaagcatttccagtttgattcttattcgaattctagactggattgctcatgactatcaggacaatgtcatcacagtttatactgacgttgaatgcctttttctccatcacattaaaaaaagttgctagcaacgaataccaatgtcattaagttaagacattgacaattaagggtgcttttttagagatcgaatcatttggattcgatctctttttttgtataaaataaaggcgaaaagaccagccttttcgcctatcttatatattatatattttaaaccttcaaaattattgccagaaagatggtgttaattatgaaagcccttcataagaatattctagaacgtcttgatcaaattatcaataatactggggatcatattcacgattttattaataatcctcatgcttttaccaggaaacgcactttagatgcagcgacagtccttaaaactacaattaacatgcaaggtcagaatttaaacagtgaactctttagagcttttggcgaagatgcaactaaaaagaacgataaagtagttagtacttctgcctatgttcaacgcaaaagccagctttctcctgcttgttttaaacatattctgactgtttttaatcaaaatctatttaatattcaactttttgatcatcactaccgtttgtttgccattgatggctctgactttaatcaaatctggaatccgaaatcgaataacattgtacaagcttcttctcataaaaagaaaccctattgtcaaattcacgttaatgccttatatgatctattgaataatacctaccaggattgtatttttcagcctaaatcagaaatggatgaacgcaaagcggctgttcaaatgcttaaagctttgaattgtggtccatatattgtaacaatggatcgtggctacactagtttcaatatgattgaaaactgcaatcgcctgcctaactgtcattacataatacgaactaaggctggacaaggcggagttaaagaaataacgacattgcctgatcaagaatgtgatcgtgagatttcctgcctggtaactacttctaactattactacatcacgcataaagccagtgagaatattcaccatgtccagcatcattatcgccaatatattaagtatcgctctaaaaatacccaggatctaagctgggattttggcgagttatgcacaataaaatttcgagcctgcaaatttagaattaatgatgccaaatcaggcaaagaagaatgggaagttgtgctaaccaatcttgatcgaaaaaattatccgctaaaaagaattaaagagctttatcatctgcgttggggtattgagacctccttcaagaaattgaagtattctttaggcagtgtacagttccattccaaacaagataaatttattgaaatggaaatttatgcccatatgattatgtttaatgcaatcagtcaaattgatgcacaggcctatattccgcaaaagcattgcaagtatcaatatgccatcaatttcaagcaatcatgcttgattattcagagcatgtatttggcttcttctttaacgcaagattttgaacggatccttattcagatcagctattataccattccaattagaccaggccgcaaggacaagagaaatattaagcccaaatcagctgtatattatttatatcgcgtagcttaaaaaagcagaatctgtgctatgccttatttgttgtacgaaaaaagcaccaatttaaccaattaaatgttaaatcagtgctttaaaagtctaatattaattgtcaatgtcttaacttaatgacattgcaacgaatactagcaactttttacattaagcataaattttacgttttaaaataccgacataaggtaaattacgatataagccgttatagtcaagaccataccctactaaaaatgcatctggagcttgaaaaccatagtaatcagcatggaagtcaactactctagttgtcggcttatcgagcatcgctactacttcaacactagcagcaccgcggtccttcatcacttcacttaaagcttgaagcgtacgacctgtatcaataatatcttccataaaaattaccggttgatctttaacatcagattttatatcttgagtgatctttaccttgcctgttgattcggtaccggcataacttgaagccttaattggatcaactgtcaatttaaagttaagtcgcttgatcatgtcactagcaaaaatcattgccccatttaaaacgggaatgacaatcggctgcttgccctcatatttttgattcaattcagcagccatctcatccatgcgcttatctaattgtgcttgatcaaacaaaattttctcaatgtcgttattcattatctgtctaccctttgaattcataattttaccaatgatccgattctagcatgattttgaattgatttaaagctttttagtgcttaaattgcataatttgttcatttattgtctatatggactataaattgttcgggtttagtggaagatagtgttttagtaattgaatatcacttttttggataaacataaaaacagcattctttcagccaatgctttaggaatactgcttttatcttaaatcttcttaatcatatggtcataagtacgatcgccaatcgtcatcgatttttcaatttcataacccttatgcttgtataaagcttgcgcacgtggattttctttgtccacatttaagctgataatatgatagccatgagctaacgctacttgttctgcctcgtccatcagacgactagcaatgtgttcaccccaatggtcgggatgtacagctaacgcatcaatataccactcgtgtggccaagcttcttgatcatcaaaaatcacggttgaaatgagtaaaccagcatttgcatagttatggcgcaagacaacatcgataatcttctggtccttataaggatacatatctaaaattccggtcaccttaccatgatcttcagctacccaaattcggcggtatgaatagcgataatcctcggaaatgaaccctaatttcattaagctatagaattgatcttctggcaaagattcaatcgacttcatctgcatttcatcaaaaatttgctttaagatgggatatacaaaaggaaaatctgtttttcttgctcttctaatcatttttctccctcaaaaattactcatcgtcatgatcattatcaaacaaatcaacatcatcaactacgtcaaacttaattggatgttctggctgatgcttcaacatgtcaagcaaggtagttgccttaggttccaataatttgctgtcatgcattaaacgatacagtgcaaagacctgtgcatatgtagcccgaatcagcaaaccatcaacctgataagcggcatcattatcgtctactaccattgatgtagtcaaaaagtcgcgcatctttctctctgcataatcgtcacccatcatttcctttagtgctggatccatgtcggcgtatgtatgtgacagcttagtaactcgttcaaaattgtaagccaaatcaacattaatccgttcaagactgtcctggtctaactggccttgattcttgcggatttcattagctaaatcatcgattgcttcaccaaatgcaccaaatgcaccaaaaacataatcaagtgtcaactgggtctccaactgctctggttccatatcgactaattgtgctgcattctgtgcattccaggcaaaagatgggctcaaaactcgtcctggtgtctggaacaaaattcctgtcaatccttgcttagcagaatattgaacgttaattgaaccaggctcaaaatcacaacgtttggttaaatttcctgcggcagactgaatcttagggtatagttttgctacaattcctgaggtgtcgccttgatcactgtcgatgacgattgaaccgttttgccaggtatcatgcggattattttcatccaaaacagagaaattcgggtcaggagtaaaaccggcatcaatgtcttgattaggtacataaatcagggaatgacctaagaaattagtgattacatttgcatcttgatcgtcactgattgagtcaatataagccatcaagctgtaaagatagccatagcctaacttgttgataatctcaattaattgatccttatcttcgttgtcgctagcttgaacgtagctattcagcttttgccgcaaatcatctagcgtccgttcattggtgttagacaagtagccatcgacgtcagggatgctgtaagaaaagccgaaaactaagcgatacaagtaatccagatcggcacaataagcgtcccaatcatcatcactaatctgacctgccgtatcttgcaaatcgcgggcaaaattaaggataaacgaaatggctaaatgagccgcacattgctctacactctcattttcaatcattgttgcaatcttagtacctagaatatcatttcgaaaaatcatcacatcattaggcgactgcaaatacacaatcaaatcgtgctgctcttcgtcatattccacgccaaaagaatctgcagggatgagattattttgcaccaatgcttcactagcctgacggaatttagcagccaatttttcagcctctggtcgttcaatcggatcgcctattagattgctatcttcattgttacccacggcttgatcagccttatccggcgcattttttaatagagaaaaatcaggatctggcttgaacagatacgaatcattcgggatctccattaccatatgatagaccacgcgaccagctgcttcgtcatcatcagttgaacgttgcacttccttaggaatcgccaataaataagcgtcaggcatttgggctaattgagtttcagtctgggctaaaatatctgccccatatagaccactagctgctaaaatgctctgcaaattttctcgcacatcggccgtggacattttatccgtgtcacggtaatagctgttaatttcggcatttttttgcgtcaatctataccaagcgttgtatagataatccatatcctgacgtagctgcttaggatcaagatccacacgctcttcaggcttcgttgcgtccataaaactgccagccaagctaacgataatcccctcaccgttagaagcatcatcttgttcaagaatgtagccataagtctgatcattcaagagcaggctaggaatagtcaagttgttaggtgtctgtaagtaaatcaaaacactgtcatcatcaggattaagttcggcgctcaatgaattagggacaatgctgccgaggctgtaaatccaaccgattgcactgtcgattttgttaattacttgttttagttttgcatcttcagtcatggaaaaactccttcattattatcgaaaaatgctgtaagcaattacattttcacatatttacgcctcgattgcattctttttgccggttggatttggtttttgggggttgaattctattttttaagcagggaggggaataccaaaatattatcaaacaaaaagtcctgctttcatagatagtacaattttatatatttgtactgtctactaaagtaggactatatcacacaagccagcgtctttaatttttacatctaagccgcaggaatattcttcagctcattctgctcggccactctaaagaatgggagataaatcacaatacctattgcaatcaaaatacactcaaaaataatgtttctccaatccatcgagctcatgtaagcctggaagaagaatggagtaaacgatggatcaacaatataacccattccaatccagtgaagactttcagcaaagtaagtcaacacaatgttaataactggtgcaatcaagaacggtattcctagaataggattaaagcaaattggagtaccaaaaataattggttcattgatactacaaatgcctggaataattgaaagcctaccaagtgcacggtacttttcaactttactattcatcataagaatacacaaagccaacgaattaccagaaccacctaagacagcgattctgaacatttgcaaattcatcaaatgagtaggagcaagtccctttgcaactaatgcagcatttgcaccagttgctgctatacctgtagcaaatacaattgggaaaatgacattactaccattaaccccaattagccaaagcaaattacccagagtcacaatcaaaatgtaaccccataagctgttagctaaaaaggtagctggagttaagcatttcattataaaggtagtaaaatctgcatgagtcattccaactagaattagatctgcaccatagaaaataaagatattaaccagtaatggaatcaacgaattaataaagttagctaccattgggggaatagaatctggtaatttgagcttaaaattacttttttcaattaaacgattaatttcaactgcaagtagtccaataataattgcaacaaataaaccattcgttcccaaattattaatgtcgatcttattatttttatcaacagttgtagtgaccattaagaaagtaactaacgaaatcatcccatcagttgctggatgctctctgcggtatcctttgctcaattcatatgcgataccaaaagcacaaatcatcccaaacatacccattgtcatattatatggaatagtaatttgagcataatgagcgactgcccaatatttccaggcagcaatccatttcatgaagaaattagctgttgctggattatatttatccataacaattggagggttagcaacaattaagaaaaaggaaccaattaccaaaaatggcaatccgaaaagcataccatttgaaatggcctgtaaatgcttttcatttccaagtttttgtccaataggcgttaaaactttatccaatttagtaatcagtgattcttttttagcagtagtttcggccatcagaaatcacctattttctttactaaaacaaaacgctttttaattaaatttgatatggattgaacttgaatgcgttcggaattaccttactgtcatcccagttttcacgaatcttatgatattcgtcccaataatgattattcacctttaattgcggtgtaacttttgaatcaacttcaaggaagtgcatacttcctcttcccatcttcttgccacgtgtagtatgcttgtccaaagcataatccggaatcttagggacatagcctaaagcaaagtttttgattataatgttcttaagcaaatctgatgaacggtctttagttgattcacacagatagcgaatagcgtgaacaaacatcatagcacgatccggttcgttgtaactaaagttttgacgcatctgatttaagctattgataagaattggagcttttggattacccatgccgatatcttctactgaaattgcttgaagacgacgccataatttttcttccatttgtggggatgaaatgtacatctcataagcaaattcacaggcagccctttctttgcctttccgaatcgatttttgtaaggcagagataacttcatccgcagctaatccattacgtgttcttgttcttgcccatggatcagctaaaaattctctatctctgttttgtggcacttcgtttttcttaacatcattttctgacataatgagtccttcctttgacacacgaggagaaatacaatgaatattcaaaccatctgcgagaaatatcaacttaataaagatgaagaaaagatccttctttatatgaacgatcaccgttcagagctgaaaaatctaaggattcgcgaactggctaaaagaacattcacttctcccagctttatcgtcaagacctgtaaaaagatgggactttcaggatattcataattggtctttctaattacagatacaccaaagttccctaataatactgaaaatgacttaaaagtaagatcttgcgtaaagcctttctccaatttgatggataagcataaagactcaatgatcatgatattgggcagtggcttttctcaaaatattgctaactatatgagtgagtatctaaatttatacggttttagatgtactgcaaattcacatcttgaattactccgtaaaaataaagacgctctaataatagtaatcagcaattctggagaaaccaaacgtttagcagaactgtgcattcatgctaaacagaataatagagatattctctctttcgtaggtgaccgtaattcaactattgctaaaaactcatcacttgtaatcagttcagatacgtttactccatcatcctttgatagtcattaccctcagctgttttttggtctaacactcatctattttgaattattaatgagttactttttgtctaagtaggtacctttccttaagacactttcatcataagcgctaggcaattgatttaaaaggttttagggcttattgaaaacatattcttatttttaaaaacaacctgaattgtcaaattaagtgcaacagttaggctatgaagaaatatattgcttgaagagttcctctgctgtgtgatattggaggattcggcgatatttgtggttaatggcatcagttgcctgttgaacataagcttttgacttgtctttcatgctcttgctcttagggaagaattgacgcaaaagaccattgcagttctcattggtgcccctttcccatggagaatatgggtgagcaaagtaaatctggcagcccttgatcttggtcatatccgcaaactcagagccattgtcaaacgtgattgatttaaaccagtcaggatgtctgtcaatctccttttgaagcagcctttggcatgtacttgcccgatagtcaggaatcttgataactacttcaaagcgtgtggttctttcagtcaaagtcattaaagcaggctgattcttgcgtctgatgcctttaaccagatctccttcccagtgcagcggagcttttctgtcttcaacctccttaggacgctgttcaatggaattgccaagatgcttcttgtgcaaagcgtgaccgccatggctgtgatgacgcttgttcctgcgtcttttgagcttcataggcagatcaatattgcttatgtccaccaagccctgatcaatatacgatagacagtaggcgtgctgggacaagggtagcctggcatagtccttttgaattcaccaacgaattcatcaatgctggtggcatcaaatttagctttaaagcgtctggagagcattctcaaaaaaacagcataatgctttaatggatcccgtttatagtagtttctgcgtcgcttatcatgatagatttgtgcaatatcagcgtagtaatgctcatagagtaaataattatgatctctttgcaggacgctaccacgtctgatttcacggctgatagtcgatttgtgacagccaacctttcgagcaattgcggaacaggaggttatgcctgaatcaagcatagcttgaatttgtccacgctgctcacttgttaattgatgataatgtctagagacgctagaatttgaattagtcatgaagatcacctttcttgatttttggtcacttcaagttcaggtcttcatggcctttttgtttaacacttagtgttgcataaatccgggatcataaaaaataaccaacatccattaaaaatgttggtcataaatttactaaatattcttttttattacatcttccgaataaacgtgttcatatcgtatgggcctaccttgtagtcagagcgatccacttcttccagagcatttgtcttaatatagccctttttcttcaagaatgaaagatcaatagtttcactagtcatattggacaaacgcaataccatcgtatccttgatagtataagcaggataaagtgctgaaacttcaataccatctagtaagttaaggtctaagtaggattcctcatctgtgatcttcggcagattatctggaaattcaatgtcccagatcttgttatccaaacgatttacaaacaaattgtacttttgaatttggtaagaaacatttggactaagccatttatcaagacgtgtggcaatattcttttcagacaactcttctccagtaaatggagtaatgccaaactcaaaatcgttattgccaagttcttctgccatcggtgttggcgtcatgacatgtcccactgaagtggtatcacctgaagcacgacctggccgccacaataagtttgacttaccaagttgaccagtcgttgccattaatgttacatagatagaatcatcaactagctcatattctttctcgcctttgccaaagaagtagagaccatttttaccgtcattttggcccacagctcgatcaaaaatataaatattaactggcttttctacaaattcatcattccaattatcatctattggctcattcttagtctttctgaaaccgccttgaatttgagtatgagcatattcagtttgcatccttgacctcattctcaatcttaaacgatgagccagcacagtattgtttatatgcagacgacaggataataccttttcgccattggttagggaaacagtcaatttgaatgggacttctttcttttgcccatcttctttcaaacgatcatccagactgtaaggcaataaccatttaccttccaaaatcagttccttataggttgaggtttctttcttggttagttttccattccaattaagtctaatctcgtggtcctttcttagtggtgaaaagtcatacgtatcgccatcatttgcctgatcatagacagagataacatcataatattcttgattcttatctctcaaagtaaatttgccatcttggtaaacaactgtgagttgatcattggcaattgaattattgtccagctcttgcaaactagttaattcttgatcagcgtcttcaaagtgaattaccttgtaacccaagccattcattctaagcttaattaaaacatacagcttgtagtatccaggctcatctttaaactcaaagccgtttggtgtcaattgcatgatatttggtcgagttggagtatatttttctttaaccaaagtagcttcatatttatctggaaatttgatcttttttgaagctgacatgaacgtaattaatttataaccatcaaaatcataaggatcagtattaaaaactatgacatctttatcagttaagttcaagcgttgagcaattctctttttaatatagttttctaagccatcagcaatttcaaaagcctgcttaaatctgtgatcaatatcaactgcaacgttatcagttacactgcctcctaaagtatcgtgtggttgagaatcaaataattgcttccataatttaatcaataatccattggaaacttgaatactcgactttttagcgatcagcatcagaggctctactcgtcttaagatatcttgttcaagcttaaagttcttgcgcttgtttctggatctaacagaagcaatagttctatgcactcttgaataagttggatatctcaattcaccctggtaagtattgagtttctttgaacgaagccgtttcataaattcagggtacgtactaatttgaacatcatttttgctatattgattaatctttttaaccgtatcagagatgttatgaactatattcatctggtcaattcctgatgggattaaaacctcatcattattaccattcttagcctcaaattcaatgcctttgtccaatcgattcttaacaaaatcctttaaatttttctttgaagccaagtcaatctgacctgtatagtatcctaatggaaagttagcagcaaatacaactgaatttcctaatgcacgccacttgaagtaaacagaccctgcttgtctcttaaaattagtaccacgccaagaaagaaaatcatgaattcctacttgattaagaatcattggtaaattggcattaaagccgaaagtatccggcaaatagcctaacatcattgccctaccataatattttctggcatcattaataccaattaccaaatttctcaataaagattctgcagcaggaatatttgcatcagtctgtgtataccaagggccaataaataattgacctctttcaacaaggtcatgaattctttctttagcttctggatgaatttctacatattcatcaatgattgacatttgtccatctaaagtaaaattggcttctggatgagattctagttcatcaagaacttgagtgaataattgatcacttaatacttgagcatcttgagtggtaaaataccattctctatcccagtgtgtatggttaactaaatatgctttaaccatgttttgcctcctatttttcatacccaacgctttgaattattgttcttaacacgtctttggtttcattaattgttttacatttatcaattaaatttctaaactgttgattttgttgcaaatcaactaaaaaagtaaatagttcttgaatgttcggatagtctttcttattaacggaaatcaaaaagacatacttaatcatgtttttatcatcccattttatcggttcattcaatctagcaaagcttacctttgattgagtggcagcatactttatcggatggggaattgcgatcccgccaccaatggccgtagaatatagatcttctcgtttatatacattgtctctaaagtcgctttcaacataatgatacttttctagatcatctatcattagatcaaggactttttccttagttaacttatctttaagtaaataaatcaatttaccatcaaacaagttcataatgaccttatttttatccgaaactgaaacgaggtattgataaagttcattactatcattctgaaagttagataaatctacctgaattactggtaatttactttcataaattggcaccgttgaaattacaaagtcagtattttttaaatcactatgctgatattcatataatgaataaacacccacaatattcaaatattcactaaattgcgaagataatctagcctttagtaacatagcagtagcagttcctgagccgcataccaatgcagctctctttttatcccaacgattgttgtataacctttccattgaagcaccaacatgaagtgtgatgaaagctaactcatccggggataatttcatgttaagttgatgctctataagtggtgaagctgtcactgtcatttcataagccaatgggaaagttgaaacaattacatttagtaaaggattctttctttgtccattaatatttttaactttcagtagtaattccaagtgcttctctaaattacgaattagttctttgtcttgcatgagattgaaaacatagtcgtccttgattctatccaagaactcaatgacaatgtcatgtatctttttgtttttcacgtcattattactatgctccaacataagttgtggataatttagagctaggtgataaataaaataatgaaattctgcttcactatattccaattcatagctacggaaaacttcctcaaaaaacttagaaaccttatcaaaatattcctctctaatgtaagggatatttcgattaaaattacgaagctgattattagttttgctgcgagctaactccaatgctaagtgaatagtgatatttttatcactataatcagacataggaagccccagagctacgattaaattggtaacttttgtcagtaacttgtttaaatctaaatcagaaaaaatcaccttttctgatttagagaaacctcgaacataattattgcctcttttattatcgatataatcaataatgcaactacgaatatccgattctgaacctttcattcttaaaagatcgccatctttttgaatctttagatgatagtttttggctacctttctagcttctttcaaatacttatcaactgttgaatcactgatatacatagtggaaataatgtcatcaatctcacgcggtttggttagaatcaaaagaagaaaatcttttaatcgttttttatagtcgtcaccaccatctgtaacgataccactttctttaatccgctcgaccaaggacttaaacttttctcgatcattaataagtagatataagccatgtccccgtttattttttattgagacatcgtatatcttaagagaattattcaaattcttaatatcgcttcttaaagttctagttgtgacacctaactttgctgctaatgctttaggggaaatataagtatcattatttttagaaattaaagacgttaaaattgattttaagcgtggttgtgtaatagacatgcaaaagtcacctcatttctataaaatgtagcttatcatattatctaatattcataataaatagatactatcttatcatgtgtaagcttaggcaattttactgtattatttactacctctagctttttaagtggctcttcctttaaatctactaattctactttattaggagccttgttaaatttgagttcatcttccttttctttaaatgaagcattgtacagtcgaataacgtatcctttacgctcttctgctttttttactgtactagtagtaaattcacccttcgtttcaaaaagactatattcttcagggagctttcttttgactacattaaatggaaagattaatcttccatttaagaattccgcatattcaaacacttgcaacccagtcttaaattctttggcgacattagttacgtttgctttttcaaaatcgcaatcagtaatatatactccaaaatcaaaacttaagaccttcttcaattcagcagcgagagttgctacagtagcatcccctgaagctcggccagggcgatacaataaatcagcttttcctaatctgccataagttctgaataaggttaatcgaatagttgaatggtgttttccaatatcttcgtactcacgtacaccgttagggaaaatagcaaacatattgttcttatcagataatgaagtataagtttgcattgtattaatcgaaattggcttttcttgccaatcatttggatgttcttgccaatccaatattgccttcttcaattcaaatggtctcttaatgctgccaaattgaatatcatcaattgacccatcagtcactatttgagtatcaaaatcaatacataaacgatggtctaacggttggcgattatctgtaactaccctaaatccaattactgggttatctttctttaactttatctcaagagataccggcattaagacaaatgcttttctatgtgcacgttcatctaaatcagctggcactctaaaatcaaagtcaatcttaagttcattaagcaaagcagatttattagcttttactttaaatgcttgatcggtagaataaattacccaatcttttttagctggtgaatagttataagaatctccatcatcgccgttgtcttctaagatagcttgtttatcgaaaacgcgcccatctgtttttcgggtgattcttaaacttccatctaaatttacttcaattttgtaatactcattttcaatcgtagtttgattgcttactgacagttcatctgcttttcctacattaggaatcaagtaatattgttgatatcccattggaggaatatttttgactactaggctaatctttgttttataaactttttctggctgataaattctatttcctgggtttaattgaacagttgcaccattaacttcttctgtttcatctttaaaaccggcaactacaaagggaataggttttccatctttatcttgaatctcaaaattctgcgctggagtgtatatggttttagtaactaatccactttttgcaacaggagtggtattgaagaccgttaacgtaattgccttgtcgtcaggcttttttatctgaaccgagatttgccgcaaagttagttcaactaaacttgttgccatatctctagcttgtttatatcgtaaatagatatcttcattaacattatctgaaacactatttgccattgaatcatgtgcagaattttcaaacattttttcccagatatcatcagctgcacctttaggataggaaataccaaattgggtacccaaagttaaaacaggttcaagaatgttagttaggtagtcttgaattaaagtattcattttcttcaaatcagatcttgaagaatagtttgttttatgaactctcatattcttaccgatattgaattcaccttttaacatgttcagcttaggtgctaccttatcaactgcagcaatatattcttctaaagaactaatcttaaatttaaaatctttatttctttcatttaatttttctattacttgaggtagattatttctcgctggtgccatatcagaaccttgaggaaaaagaatttggtctgttgttgcttgtttaactacactagcaaagggctcagatgtcataatcttatctaaattattttcatcaattagaccacctatgaaataaccacaggccattcgataaacattaattcgactgccatcttcacctttccaaataaattctgaatgcgtagcttcataattgggaaaaccacgccataaaacagctttatcaattcccaaccccttatagatttgcggcatactagattcctgcccaaacgaatcaggtacatagccaatattcatgtagcctcccaacttactacatattttcattccatataaaagattacgcactatattttcaccagatggcaaaaactgatctgtctgtgtataccatggaccaataataagttttttatttttaacaagattctgcactttctttaaatcttgtggacgccattttaaataatctgcgatcaaagatgcttgaccatctaaaataaagtgattaaaacctacattgttttccaaattattaattacatcttttagatcttttaataagtaaatctgtgcgcgagaggtagtaaaaaaccactccctatcccaatgcgtatgtggaactacatgaactgttttaaccataactaaccttcttttctaataaaaaagctatagccaaatttaaactagaggggaaaagtactttgttattgactatagctttttgtttatttttcaaattaactgatttattcggtagtaatgtctaacttaatatcgtcctcgctaatctttttaccgttgtcttcagtgaagttggcaactaatggagcaacaacggcaataaacaaagcacaggctaaaataccacaaacataagcaggaatattatcagcagttaagatacctggaataccacccaatggaggtatgtgtgaacttactcccattagttcaccaacgccagcacctaaagcaccaccgattacatttacaaagattaattgtggggctttcatccagaatggaatagcaccttcagtaataccgaatgtgccgttgatcaaatttgtacgccccatttccaaaagttgtggagagaatctcttcttaggccaaataaaagtcattaaagcataaccaagaggaatagcacaaatggcaatattagtgtaaagacatggtttgtaaacaccttccaggaagaagaagttaccagcagcccaagcagctttattgacaggaccgcctaagtcaacaccaatcatgccacccataataagagccaaaatcaaaccattagtatggtcattaaccattgttttaatccaagccaacaagccagtattaatccacgctaatggacctgcaagaattaacccattgacaatagctacagcaccagttgttaacaatggagttaagatcaattcattggcagaattccacttttcaggaacattaatatgtttacgacaccaacgagcaacgtaaccagcaatgaagccagctaccatagctccaataaaaccttgttgagtattagtagctaattgaccaccaataaaacctgcacccaatgctggtttatcaccaatggcataagcaatataaccaccaattactaagttgaccaagccaatacctatccaaccaacttggttgacttgatacagcatatggaagaagccagtagctttagcaaatttacccagatcatttacaccacaagccatacctatcaattgtgggataccaacgataagggcaccaccaataattgtaggaatcatgtaggaaatacctgtcatgatatagccttgccaatcatgcattagtttcttaaatttcatcattttactcccttcatttcaaagtagttaaacattattctgttaaactaggcacctttgactacagaaacgcatttcttaagaagagcttctggagcttgaatacaagtattaatatcaactctgataactttctttcccttaaaacgatccattccttcgatcttttgatcagagccaattaagacaaaatcagctttctgggcttcttcaggtgtaatttcatgaactcgacccataattccttgctgctcgatcttaacgttgtaacctaatttctttccggctaattctagtgccttagctgccattggcgtgtgagctagcccagctggacaagaagtaataccaacaatatttacatcactcataatttattagctcctatctttttcctaatatactttgcaatttcttgtgaatcgtttaatgttttcaagttttgcttaaaatcatcttccaataaagcagtcgacagattggcgagcatctttaagtgagtattacctgcatttttaggtggtaccattaatgcaaaaacatctgtaactggtttattatcatatgtcttccattcaataggtttctctaagcgaacataaataataccaactctttccacagcttcagatttagcgtgtggaattgcaaatccatcttgcaatcctgttgaatattcttcttctcgctttttgaatgatcccaacagaccttcaggatcattagtaaagccaatttcttcagcatattcagaaattttctttaacaaactttctttatcagcgacgttcacgtttaaaagaacatcttctttttcaaacttcattaaatcacctctcgtattatataaattgtaattagtcatattgtgataattaatcaaattagtatttgctttttgatcttcacatgttagcctctaattgtcattggctttggtcaactggtctaggttatcacctcctgcagttttgtctgctttataagtctgccacccagacagttcctttatgctctaactcacatgctgtattgattgcttctttttgctagtccttgagcaattgggattaggtgcagctttcaaagaagcaaccagtgaatacttatactggcgagattgaacttaagaactgtaattaggggttaacatgtgaagatcaaaatctatgatcagaaatttgaaagaaaggaggccatttccaatgaaattatttgtcggtattgatgttagttctaaagatttacaggtcgttgcacttgattcagaagatcaaaacaaacgcttaattaacgatagctttgtcaatgatctttatggtgctagtgaactgaaaaaacaaattttagatctagctcaaaataaacactatgatcaaatcattattggcatggaagctacatctatttacagttttcatcctgcttactttttccaaaatgacgaagatttacaaaagctcaatgtagagactgatgtaattaaccccaaagaaaccagcaggtttcataaagtctttgaagaaagtaaaactgatcctctcgatgcttattacattgctttgtatctaagctttggacattatcgagtaagcattgccagacaagacaactatcttgctttagagcgtttaacgcgtaccagatatgaattagttcaagaactgactcgtaccaaacagcacttcattgaagctttatattatcgggttaataaactaatcactgtcgataaagataagattaatactcctcttttcggtgctacaatgatgtctattgtaaccgatagtaaaactctggatgagatcgcggatatgcctaccgaagacttaatttcttacttacaggttaaaggcagaggacgcttttccgatccagataccttggctaaagcaattaagaaagctgttagaggttcatatcgcttaggcaaagtaatgactgattcaattgatgcagtgctttctgttcattacaacatgattcaaagctttaatgaatctattaaagatctagaaaaagcaattgatcgtatcgttgatgcattaccagaaagcaaaattctggaatcaattcccggtattggcaaaacctatacagctggtattatcgctgagatcggaagtatcgatcgctttgataaagaagaacagctggctaagtatgccggcctaacctggaatcaatatcaatcgggagatcacagcaacgaacatactccaatggccaggactggaaacagatatctaagatattacttgattgaagctgccaatctagcaagattacatgatcctgttttcaaaaaatattaccaaaagaagtatgatgaagctgtctactcgccgcataaacgtgcttgcacattaactgcaagaaaattagtacgagttatctttaaattgctcaaagatgacaaactgtacaggacaccgaggtcttaatttcaaaaattggtctaaatttaaaagtaaacaaaagtttaacattaaaaaaatcaacctttaccaaggcttagtttcatatactcaaatttatgatcaaaaagaacaaatatcatcgcctttcatttgacttattaccacatgacttgtccgttgggccttctttgtaaccccttacatctaatatgattgcatattctcttctataagtaatgtctcctaatttccacttaaagtggaaattaaatatttataaagttacgtcatgtcctaaatagcttaataacagttcacaaaacatcatatttgcccatgaaaaccacggtcgagtaaaatcactaggatcattaggattaaaactctcatgaatcatattgctaccattggttgtgttagccattaaatacaataaattctgtttttctgctttagtctcttgggttaaccctactaatgccatacctattggccagatatttcctttaggagtatgcggacttccttgaccactccaatattcaccaatatagaaatatggattatctggagacaaaatgaatcttcttgtgttttgataaatgtcatcagtaggtttaacgtaaccaatataaggagcagacattaagctaggaacattactatcatccatcagcacatagttgcctctaccatctacttcataggcatattgctttttaccattgtgctcaacaataccatacctttgaattccttcattaatttcattttgcagtgttttagcctttgcaactatatctgaatcatccaaaatacttgaaaatatttcttgaatataatttaaaactactacggcaaacatgtttgaaggtatccagtatccatatgtacatgcgtcatcactcggtctaaatccagaccaattcattcctgtatatgccacaggcgttcctttacctttattctttaaagtatcagttggaacatcacagtccctttcaaaggtgtagttagaattctcatgatgttgctcagttttaatagttgccagcatctttttaattccagaaacaaaatttgcatcaaattgagctgtttcacctgtgttcttatacagtagatatgccagctgtactggataacagagtgaatctaattcatattttctctcccaaatccagggacccatttttgctttatctgtttgatgaccttgattattggcagtcatattaaatgcattagcataaggatctaagttcatattaaaaaattgccgttttactactcgagtaataatatccttaatgttatcgtcagttttagctaacaataaatatggtcttaattgtgcagatgaatctctttgccacattgccggaatatcaccggttaatacaaagatatttttattttcatcgacctttaaagcattctgcaaagtatctaagaaagtcttgttaaaaattgtatataaacgttcatctttagtgccacattctgcttccacttcattcatataattctttacttgttcatcaataatgtctttcattattttcacccccagccaaattataaaacgcttttataattaaaaagaagacattacttttcaccttattgtggaaaacaaataagccattgcctgtatttttacaaagcaatggcttattcattattaaacggttattcctcacccggtgcagatataactattctcattttaccagtgaaagtgaaattcttcatctcatttggaataattaaattagttccgatcttcaaatcatatgatttgccatcggcttctaattttccttcacctttaataactgaaactaaaagatatggatgatcctttaagccggtcttccatgtaccatcgaggtcaatttgccataagtagaagtgtggtgaaacaggtggttcaactaaagtcttgatttctgcatcttgatccttattagtcttaacatctagcttaggatcaacatgtggcacagttgtaacatcaattgacttttgcgtatgaagttcacgctttttgccgtctttaccaacacgatcataatcgtacaaacggtaagtaacatcacttgattgctgagtctcaataactaaacagcctttagtcaaagcgtggatagtacctgcaggtacgtagaaaaagtcgccagctttaactggaacctttctaagtaatttgtcccattcgcccttatgaatcatttcagccaattcttcacgatttttagcatggtgaccataaataatgtaagcacctggatcagcttgcatgacgtaccaactttcggttttaccagaatcattttctaccttacgggcataatcatcatctgggtgaacttgaactgaaagattatcattagcatctaagaattttactaataacggaaattctttagccttaggattaccaaaaagttcaggatgctttaagtaaacatctcttaaagacatccccttgagtggaccctctgttacaatagaagcatcgtccttgtagccggaaatgatccaagcctcaccgacttttccatctggaatatcataattgaaaatatcttttaatttacgtccgccccaaatttttggtctaaaatacgggatcaaaaataatggttccatttaaaatcacctcatttttactttagctcatttaaaatcatctagaaaggtatggcttttctttcttttgaagaaaaaagatacacttacgaccacatatttcaagttggtttggatctataaaaagatataaattttataatatcagtcggttataaccaattaattatttatgtaattaggatcttatttcgtgaaaccgtaaaatagtttgtgtaaggatgaatgattccttaaatttatttctttaaacattagaaaaaggagttcctttctcgtatgattggtttgaacaaaaaaacacatacagaaagaagaactccttcatgaatgattttaccaaagattttgctcaagctctattcaatccagacaaaataaatgatttattgcgcaaagagctacaacaggctgttaataacttgttagaagctgaattgactacctttctgggctatgatccctatgccagaaatggctggaatactggcaattctagaaatggtgcttatttccgcaaggttgatacccagtttgggccaattgaagtgcaagtgcctcgagaccgcaatggacagtttcatcagcacacgctgcctgactacaagcggcactcggatatcttggaaagcatgattatcaagctatattccaaaggcgtaaccaccagagaaatagccgacttgagtgaaaagatgtatggcagtcattatagtccagcccaagtatcaaatatttccaagcagatgttccccaaggttgaggcttatcacaagcgcaagctaagcgacaagtttttctgtgtctatttggatgcgacataccttcctttgcgccgagaaacgtttgagcgtgaagcagtatatattgccattggcattaaacctaatggacataaagaagtcattgactactgcattgcgcttagtgagaacattgaagtctggacagagatgcttcaaaacatgaggttcagaggcttgatggaaattgagtccgatctgctggtcttctataattatcccaaacaaatcagagcttcaatttattcaaccagcatgattaaatcctttaacaacgtcatcaagcgtaaagctaagcctaaagcagagtttccaactgaacagtcgcttgatgcatttattggtatccaggcaatgagctacaatgaccgctatttcaaccgaattcataaaggctttggtcaggttcaggataccttagaatcctattttgattaaataaataattaaaaaatcaatttgcgagaaagaactatttacacaaaagatttgacagtttcataaattatctatcactagttactacttataagactaacatcttacttaatcaaactttaaacaaaaaaataagaggtgaactacaacatcgtcacgttatagttcatctcctactttaagttgtttgacaaagagtcacattagctagtctctgtctcttactacatacattaatagttaagaagtggaaattaattaccaaagcacctctatttcaatgaacctgggaatctaaattcatatgaactaatcgggcctactatatcaagactagttatttgtttgactaattcttgaaataaaattattgcgttattaacaccataattgtttactattttttggattttttctggacttttaactttttttggattctcaatatcataaaaataatccactttaatatttaaagtcctatattcagaatcattatcattttcttcatttgagcaattggcatgccccgataatgtcacaattgcatcgtttgcagaaatagccacagaaatatcatcaaacataaattccaaatagaaactgtcttgttgctgttctagttcacctttgtattcataattaagtttattaattataaatccattatatttaagctgtactgacatcgttatctcctatttctttaccatttgtggttgaaaaactgatttttttattcccacctgatagaaagacagtgtcttttgtttattagagctttcgtttatcttcatctttgctattactttagaagttttatgctgtaatgttttattatctatttcttttatttttattcgttttcttgaaaaactagataacttatttaaaacttgctgatatttttcttcactactttctaaatcaatttcctgctcaacttctgtatacgtgcttaaactcaaacccgttaattttgctgcttcatctctatttaaattcaaactaattctttttccgaaaatcttttgtgataactggaattgatatgaatttaatctactattatttggattgattttattgaacttcatgtctttcgtttctccttcctataaaattcttttccctattattcaccaattgattatgaattagttcagccagtttcccaagttgatcagtaagtaaattcatttttcttatttttctttgatctttagtaggaaatttagtaaatccatatgtccagacaaaatatactttactctcatttaatgtaaataaaattctacagtttttccttacgccttcatttgtttcagaaagaaagcgaatctcatatacatgattttgtgacatcaattttttaacaatctcgtacttgatatatctgttagaatttggaactttatactcatccttaaaagaatatccaataataatcccttcttttacttcgggctttaattgttcaatattaccactactatctaaagtaacatttgaaagaaagttgataattcttaacaccgattcttgaatattaggattaagattatattcatcttctaaatattcttcggctaatttttgctcagacaagttatcatttatcaaatagaactggcgcatgggtcactctcctttgtctaaacattttacgtcaaaatcatgatattttccattctttgttgaactacagtaagtgttaatgtttttgcgatagactatcagccatagtctaaccttattctttagcttcatcaattatatcagcatccccaacctcagcacaaaagaaaaccgactccataatattccctgtcaatagctttttattccatcaaaaaaggaggacatagttctctttgataaaaaatctattccactaaatattttataaataaaggtgatttctatgtcctctcttaatcattgtattaaatcgagcttgacattaaagatgaaaatatcgtttttaaagcttgtttgaattaacaaacaataatgtcttaaaagataccacgccaaaataaaagcgaccttcgttcataagagcaaagaccgcaaacttgttaattgtctcaccacagaaattaacactcaaattctaaccttacattgcactaaaaatcaatacaactctacgccttctcaagcaaactatggtcaatcggttcgcccttcaaatgcgcgccgcgaatcgttttcgcaatcattgacttgcgcttgctcttcttatcgtaaacccagtcgccttgagctgtggcgatattctcaactttggtagtatcaccatcaattcttactaagaatgctggtgccattgttgagcgcttgttaggacctgaagcaaaaccacggttggtcatgtatgaagttactaatacttctttcttgtttcctttaattggaacagcatagtatgaataagttgaagttctccagttaaatggaacactagctaccaagacagctgcgtcgccattaagtggtttataaccataagttaagtggtctgaaacccagccgagcatggcaacattgtcaccgactttggcatctgcttgctgccacaaatcatcaccagtaccacggttcaagcgagttgtagcaaataaatggtacttgccgttcattggaataatgtttggacgttcaatttcatcagataccatcaagctgttaactaatgatggcaaaacttcagcaactttaggattattctcattcttggtaaggcgaatgataccaatagtagcgttagcccatgttgcacgactcctcatgtcgtcattagcagtcacctttaagaagttttgcaaagcttccttgggtgtaccaccataatttttccaattatagacctgattttctccttggtaattattactaccagttgaagcttcaaaaatcaggtaacgctgaccaccaacagaaatcacatgcgcatcacgcatagcaacgttatctgcacctttgttggtagacttccattgcttgtatgtctgatagtgataaccatcaccttcgaataaaacatggcggtgacttctcttagctatcgaaattgtgtttttcttcttgttaaccttcagcttcaagttaactgttgcaatcttttggtgattagtattttcacgggtgtctacatcagcgtagaacaattgaatactgccatctttgtttaccgtagctgagcctgaccattcttgatcagttggcttagcattaaaaccaaagattggaccagcacatttccaatggttaagattattgtcattgtacttgttatagagcaaataaatgtgggcatcattttgctgaggaatccccatcatggcgatcattaattgatagcctttatagttaacaactctaccagtcttagcatcttgtactggccatgaatcccaaatttctagttccgctacttgaccagtttgtgcatcacgcgtaacggttgccggcatgtttttaatctttttagcattaaaatatggtacgcgatattgcgcatcttgatcaatcatctttttagccacgccagcatattgatcatagctccagtgagtactagtatccttatcaagctcattaaagttcaactttcttacttccttaagttggacttcagttaaatccttaggattaacatctgcagcttgtaatatttgaacagtttgaggatctaacttgtaaactgctgcgtcgttattttggctataactagtattattaaaaccattagaaacattatcactagtagattgagtagtgtccacccctacttggttttgagcattctgatcagtattagtagtatctgcaacaccagtgttgttttgattatttgtattattggtggtgtttgccccagtattattttgcgttgtttgatcttggtcctgatcagtagctacatcattattttggttagtttgtgcttgattttgatctgatttatcgttttgatcattagtggttgcagcttgagtatttctctgaccaactgcaggttgctctactgtatcagctttaactgttaagctgttatttatattaaacaagccaagtaaaacagctgctgatgcaaaggtaactaatgtgcttctcttgttcatctctgttcaattttccttctgttattccatagccagtttattataatatcttgttcggatttttggaaccttcttaatcaaattgaaatattagctgtgattagcaaaattagatttagaattgaaatgctgtactaaatattaaaaaggttctgcttatttatgctgacaagtacaatttattgttgaattgtagctatataaaaagtctggtagctattgccatatccatctttcccttaatcgtatgcatcccattacagccaaaactcatattcctcaggaaaatgcatactatttaaaatattcgacatagtatcagggttaaattgctccttaccatctcttagtaactgtttaatagcatttgctatctcaacatattctgcctgatctaacaccagtctaagacttaatataagttcaaatacaccaggttgactattaagccttaaatcgtattggcccaagatatttctaacagaactcaaatttggtccccgatttattactttagaataagttatttcgttatgtgcaacagcatttctaaacatattcgtaacatggtttatatgttcaataacttccggcgtaatagcattactctgggataagtcattagtttttctatactttaaagtgaaatcacgtgctattttctgccttaattcatccttgcagttaatgtagaaataatttaaatctccaaaagtcataaattccgttacaacccataatggtatacaagtatgagaatcaatataatgctttatcgcatttcttcctcttttatgcgcttcttgctctatttttgttgttagtgagctgattgtttttaaaactctaacagtattatcactatcgtgcttaaaattattaatatccaaataagaatattctacaggaaacatttctgaaaacctataagccaactctgaatttaatgtagtttcataagaaagaagaccattgtataaaatggctctcaactttttatcaaactggtataaagagactatatcttcaattttcgttccattaatatactgatgcggattaattatattacctcggtcattttttcttaaaaagagacctttgtaaccattaattaaagtataatagcctattttacttaatacatttttagcatagtcgtcattttcaattaacattcctttttgtcggagaatgtctatttgctgatccaaatttttaaaaggcctactcgttagttccaatattaactcctaaaaaaacaaaaccttgataataacatccaatgtgaatattatatcaaggtttcgtttagtttagaaccttctcctagtgcctctaaacttgatctgtcttaagtattattatacgtagttacaaatatgtttgcaactaattagataactttgtaatcctttctattcctacacgttttcttaaactaagcattaaactttgtttgtaacaaattataaatagttgcgctttcaacctttagtaaataaatatcaatctcaatttatacaaaattctgacataaccaatcaattactttttgaatctattttacgattgtaatcatcaatagcctttatagtcttagtaatcgtttccgatccaattgattgatataattttttatcaccaataataaagaaccatacttttgctcttgtagctgcaacatttatgatatttggctcacttaccgcccaattagcagcacccttttctttatcagaagcacctagaacaagaaaaacaactttattctctttcccctgaaaagtatgaactgttccaacatttgatggcttaccattttcatatttaataaagttaatatcctttagttctttagtcaactgataagcaacattcttaaaaggagtgatgacaaaaatatcatccattgtaaatggattattcgagttgtttacaattttttgaatcaagcgttttaacattcgtgcttgttcttctacaaatttattttgagatacgccttttacatcaatccaatttcctgctccaatttttccttgtttcttttctaatttaccccctttagcttctttttccttaacattacttggtaaaaccattttattattataagaaattgtattagctatattaaacattggatttaaacagcgtctatgtacccaaagcggaatgccaatccaattttgatgttctttgtctttataataaccgtactgactagcctgacccataatcgcttgaaccgatgtatctccagaaacgtatttttcacctactttgaaaattcgatcaccaataagtgaaatcactttagaatctaaagtattgacaggcttaatttgagcgggatctcctactgccataattttttggctacgtagaagtggacctactactgattggggaactgcttgtcccgcttcatcaataaataaattagccacagaattagcaggtaagtttttaaacatccgatgaaaacttgcaaatgtagtgctaataattggaactgcaaaattaatccattgccaagaatatagcgttaattgctgttgattttcttttacctttttatcttgattattccaattaactatcgccattattagtgatttgctattttcataaagaaattgttttcttactcgcaacgccaatacaaacagcttagattcttctcgtaaatcattcgaggtataccaatatgtttcttcctcaaattgatcataaacatccctatttgaaaaatcacgttgatagtttggaaccattgcttcctttagcttttcatcatttaatattcgagcataagtatgtgattcaacttgcaattgatctattttattttccaacttatgcttctcagcatttttctcctctatcacacgttttaattttgataatttttcattctttttccttttttgggttatcttttctttattaaaaaatctatctctaaatctaacattttccattgatgaagcaatttcttgatactcttctttcttagaattaatctcttctgttacttcttggagaactggcgttaatttagaaaaaagaatatcgccatttgctacagtcgttatcttatactcttgaactttttcacgccatttttgtaattgccctaaagaattcgcataatcttgcaattgatttctcctattttcaacaagattatattgttttataaaatcatcataagcatcggtgtctgattgataattttcatcttgcaactttttaaccatttgtcctagcttatcgataatattattcatattttccttacgaccaccttcaagcgaaaaaagtccccaatactttggcttattcaaattggcgttagcgatatcatcaaagtaatgaacattcaatagttcatcaataacttctttaaagacatctttgtcaggaatttgcggtaattcgtctacaatattttgaacagcaccattattagaagaagttacgactatatttttattagagatttggtcgggtaatttcgtttgccccaccttactatctccaggtaaataaacatttttcttatcaagatcacaaatttcttttgcttgtctaactatcaactcagcaaagatatcttttaataaagtagtttttcctgtgccaggagggccattaacagttctgatatcattcttatcatttatagccaagttaattgccacttgttgcattaaagatgctggaaattttgacaaaaaatgccccattggataatttttaggttgtaatattttatcaaatatatcaatattcttcgtcggatcaagattaatccgttgatctggatttaaaccattcaagtaacgttcaagatgatcggacttttccttttttgcccagttcaaatcatcaataaaaaatgaatgtaaattaatatcatctgaatcaatctttttaacgattgaccaatagctcgtctttttgctaattttatatcgttttactaatttcttaaaagcttcattaaattgaagttcaaaacttttttcatctaaatcattttcttgaaagccaaaaagttcatttatgtcatttttcacctgatcttcaaactttttgaacttatctgaatcatcaattaattcttttttattaagcacataactactcattgtaacaaaagtttggtcttctaataagtgtaagtttttattaaatgcaatagaaactccaaatttagtttgcttattattaacttcgtcttgtaaattttttaaatgatatttgtgaacaattatatctataacttgttgaaacctaaaggtatcaatgtagaagatcaatcctgaatttgagctttttttggttaaactacctttatatttacggttaatcatccaacgaaagtattcataatagccatgtccctcagcctttgttggatcaaattgcttagctgcatttctatccccacgtttagtatttacgtcaccctcagatagttgttccattaaaatccatgaatttaatatattcttctttatttccatctttttacctattatttttatatcaacctatcaacaactacttaaacttctcacacaaaattgtctattttcctgtgatctgcataattttgcaaatataaggacgcatccccatttcatttctatgatagacaatgctagctaaaatccaaaatatttttcatgccagcaaagtacagatgataaaatttacagctccttttatcattcgctttttttcaaaagaaaaatatagaatgcaaaacttaaaatgattaatataattatccacgtagatggaaaagatgtatttgcaaatattcccagcaaaaatgcaatcataatattggctaatacgtcttttaaaaagctataccaccattttgatttagaaacttgatttgtattggcttcaaattcatattttataagcgcaaccacaaaaaacataccaaaaataaacagcatcacaattaatatgttcagcgttaagttactactaatccaatttattaatgtgcctataaaaaacaagttatagatatcatagtaattattcgctacttttgtgtacttctctaaatttttatttttgcgatacatataacaagcaaaaattacatccaatattacaaacaatatgagactgtaaaatagtttgtgtaaggatgaatgattccttaaatttatttctttaaacattagaaaaaggagttcctttctcgtatgattggtttgaacaaaaaaacacatacagaaagaagaactccttcatgaatgattttaccaaagattttgctcaagctctattcaatccagacaaaataaatgatttattgcgcaaagagctacaacaggctgttaataacttgttagaagctgaattgaccgcctttctgggctatgatccctatgccagaaatggctggaatactggcaactctagaaatggtgcttatttccgcaaagttgatacgcaatttggcccaattgaagtgcaagtgccccgggatcgcaacggtcaatttcatcagcacacgctgcctgactacaagcagcactcggatatcttggaaagcatgattatcaagctttactccaagggcgtgaccaccagggaaatagccgatctaattgaaaagatgtatggcagccattacagtccagctcaggtatcaaatatttccaagcagatgattccaaaggttgaggcttaccacaaacgcaagctaagcgacaagtttttctgcgtctatttggatgcgacataccttcctttgcgccgagaaacatttgagcgtgaagcagtctatattgccattggcatcaagcctaatgggcacaaggaggtcattgactactgcattgcacctagcgagaacattgaagtctggacagatatgcttcaaaacatgaaatcccgaggcttaaagcaagttgagctttttctttctgatggtgttgttggcatgaaaacagccttggccaggacttatcctaaagctcattttcaacgctgtttggttcatgtcatgcgcaatatctgcgctaaagtacgcgtcgacgatcgtgaaaagatcatgaacgaattcaaacaggtgcatcaacagacaaacaaagaagaagccacagctgtcctgcatgacttctataccaaatggggcaaggtttacagccatgttatcagaagcttgaaagacatagaaccagatctgctggtcttttataactatcccaagcagatcagagcttcaatttattcgactaacatgattgaatcatttaacaatgtgatcaagcgcaaagctaagcctaaggcagagtttccaactgaacagtcgcttgatgcttttattggcattcaggcaatgagctacaatgaccgttatttcaatcgaattcataaaggctttggtcaggttcaggacaccttagaatcctactttgattaaataaataattaaaaaatcaatttacgagaaagatctatttacacaaaagatttgacagtttcaacaatatcgataagaaagcaaaaaacataaatttatatgttattacttaaacttcccacacgcaaaattgcttgtttcattgtgattctgcgtgttttgacaaatataaaaggcacaagtccttttcattgctataattatattgaccaaaacataatttatttgcatgaaaggcttgtgccaatgtctattttaccatctcctgaccaacaaaatgaacaactattttcaaactcaatcatcagcttcatcaagaagtttcaggtgatcaagctgttgagaaaatgtggcttccgcaaggaaaaaggcattagcctgttcagcttgtttctttacgttttaagcaatgtctttcgtgaccgcagcttatatatgcagctgaaaatggatcattttcaagaaaatttttccaagaactcatattaccgttttatgcgcaacgttcacgtcaattggctccacttcaccacacttctgtctgcgcaaatcattaataaccacttgcgatctttgacttcagaaaaacgggctgattgctttgttgtcgatgattcctacttctctaggaccggcttcaagaaaacagaattagtcgccaaagtttttgaccatgtatcaatgacttacaagaaaggttttcgcatgatgaccctgggctggactgatggagcttctttcatgccaatcaattcagtgctgctgtcttctcagaagctacagaatatgattggcgaaaataaagtttttgatcagcgcaccattgctggccaaagacgtatgcttgcccggactaaaggcacagacgtgatggttaatttaatcgaccaagctatgaaagcaggtcatcaagccaagtacgtgctgtttgacagctggttctcaaatccacatcaaatcgtccagctcaagcaaaggaagctggatgtgattgccatggttaaggttagctccaaaatcaaatatgaatttgagggagaacgcaaaaacatcaaacagatttatcgcagctgtaaaaagcgatgcggccgttctcgctacctgctgtcaatcccagtcaaagtcggacgccaggacaaagacggtgctaaaatagatgcacggattgtctgcgttagaaaccgtgccaatcgcaaggattggctggcaatcatttgtaccgacatgtcgcttagcgaagatgaaattatccgcaactacggcaagcgttgggatattgaggtttttttcaaaacttgcaaaagttatctaaaactaagtacggaatatcatggcctgtcttacgatgctttgaccgctcatgttgccatagtttttactcgctacatgcttatgtcagttgccaagcgggacgatgaagatgaacgcacgctaggcgagctgttctattgcatgattgatgagctggcggacattacttttagccattccttgcaattgattactgatgcaatgctggccagcgtaaagcaagtctttcatgccagtgaagcacaaatagctgaattcacggctgactttatcaatcgtttacccaaatacatgcaaaaattgttaaagaaaactagcaaaaataatatagaagcctaaagccaagcaagatcaagagattactggcttatttagtgtgggaagtttaagttactactgtatcaagctttgttaatttctctttatctattccttaatcgttttcagttgatcaatcaggtagaccaatgtatcaataaacttgatgtcaggcaaagaatcattcattaaatagaataagtcttcatcattgttttgtctttcctgccaagccagaagatcataagcaaccgctgtagtcgcaatatagccgcattagccgtcataattttaaatttgcaatttgattaaagctaaaaattgtttggcagtcttaaagtagattttaatttaccatctgcgaacgtaaagctgaataatttaactagggggactaacttacctgcgcttaataatgcctaagccacaagtcctaattgcttaaggtgatttttggtaacgaaaactaggaatcaaacaaaacatatttggcgagaatgcctagactgattgcttgtctaattaactctacaatattcatttgtcggcggctttggcccttcttttgccagcatggaacagtgaatgacgagaaaaacacaggcaatgtcattaagttaagacattgacaattaagggtgcttttttagagatcgaatcatttggattcgatctctttttttgtataaaataaaggcgaaaagaccagccttttcgcctatcttatatattatatattttaaaccttcaaaattattgccagaaagatggtgttaattatgaaagcccttcataagaatattctagaacgtcttgatcaaattatcaataatactggggatcatattcacgattttattaataatcctcatgcttttaccaggaaacgcactttagatgcagcgacagtccttaaaactacaattaacatgcaaggtcagaatttaaacagtgaactctttagagcttttggcgaagatgcaactaaaaagaacgataaagtagttagtacttctgcctatgttcaacgcaaaagccagctttctcctgcttgttttaaacatattctgactgtttttaatcaaaatctatttaatattcaactttttgatcatcactaccgtttgtttgccattgatggctctgactttaatcaaatctggaatccgaaatcgaataacattgtacaagcttcttctcataaaaagaaaccctattgtcaaattcacgttaatgccttatatgatctattgaataatacctaccaggattgtatttttcagcctaaatcagaaatggatgaacgcaaagcggctgttcaaatgcttaaagctttgaattgtggtccatatattgtaacaatggatcgtggctacactagtttcaatatgattgaaaactgcaatcgcctgcctaactgtcattacataatacgaactaaggctggacaaggcggagttaaagaaataacgacattgcctgatcaagaatgtgatcgtgagatttcctgcctggtaactacttctaactattactacatcacgcataaagccagtgagaatattcaccatgtccagcatcattatcgccaatatattaagtatcgctctaaaaatacccaggatctaagctgggattttggcgagttatgcacaataaaatttcgagcctgcaaatttagaattaatgatgccaaatcaggcaaagaagaatgggaagttgtgctaaccaatcttgatcgaaaaaattatccgctaaaaagaattaaagagctttatcatctgcgttggggtattgagacctccttcaagaaattgaagtattctttaggcagtgtacagttccattccaaacaagataaatttattgaaatggaaatttatgcccatatgattatgtttaatgcaatcagtcaaattgatgcacaggcctatattccgcaaaagcattgcaagtatcaatatgccatcaatttcaagcaatcatgcttgattattcagagcatgtatttggcttcttctttaacgcaagattttgaacggatccttattcagatcagctattataccattccaattagaccaggccgcaaggacaagagaaatattaagcccaaatcagctgtatattatttatatcgcgtagcttaaaaaagcagaatctgtgctatgccttatttgttgtacgaaaaaagcaccaatttaaccaattaaatgttaaatcagtgctttaaaagtctaatattaattgtcaatgtcttaacttaatgacattgaaacacaggggtcttgctttttttattatagacaaaaaaagcaaggaactacgcgggaaaggcatgatttctagctttcagcctttaattaaataaaaaatctatttatgatatacacaaactgttctacagtctcaagaattgttattatcatttatttcctttacaatacctgatttgtcaaacaactcataaaattccttaatgttttttttagtttgataaatatttctaaccgtttgtcttcctcgacaaaaagtaaagtacagcttttctttagcacgtgaaattgccacaaaaaatgctttacgatcagactcagattggtttgagaaactccaaaaagcactatcttctaatccaataaagtaaacagaattatattctagtcccttactcttatgtatagttaaagttgctattgaattctttcctaaataattgtcaattatttctttccatatttctttgatgtcagtatttaactcatttattgatccgcattctttaagctgctctataaattgagttttcgttctatttaattgatctatttctaagtattctggatagtaaacttgaagcctattaatcgtaaaaaagtctattatagattctacgattttacagtaataattactttttgatctattctcatggacttgaaccaatagatttttaaatagcttatcaaggaatacatttaattttttgatatatttttgctctatttcagcatcagctaaattaatgagaaatatttcagaagtctcatctaccagttcttgccactcctgtccatttatcacgttaatagacgctaaaatcattttcaaaatcaacttaactataggttcagagaaagtttcagtatactttgattcaaccctaacagttacatttttagtttttaaatactcttttatatttcttatgtaatcttcagggcgttgttttactaatatagcaatttctgaaggcttaacacccatacgtatttcttttataatattttccccaacaatttcagcttcttttgagggttcgttagtttctattagaaaaactttcccttcatccttatttttattaattattatgtcagggtttatatccttatctattttttcatacataagtttttgtaatttcactatatttaaagctgatcgatgattttcttttaaaaatacctttgttgctctaaattcacgcgtatactttccaaaaatttctttatccgcaccagcccataacattatttgctgcttattatcccctacagccgtaattttactttcactatttaaaaaacattcacggaaaatatcatattgcaaaactgtagtatcctgaaattcatccagaaacacaaaaggaaaagctgatcgaataatatgtcttacatatttattatgctggataatatataatgctagtctagaaatcatttcaaaagtcaaatacgttttttcttctcccattaacatatacttccaaaatttataattattactctgagggtttatatcattcaaatctactttcaaaagatcatttacagcgtttctatcaggaacatagccgaaggcatgttcgtatatttttgtttgagttgaattagaggagatttcatactgaggtctaggtcgtaaatctttcggcaatactaaataaaatctgtccactattaatttagcaaaagcatcaaaagtttttgaaataaatctacttccctcttctttaccaactctttttgaaactctatctttaatattctcagcagcatcacgcttaaagcttattgctaaaatattaaaaggagcaggacataatcctgtttgaaataaatatgatgctttctgtgctaataattctgttttacctgctcctgggcctgcttgaaccaaaatattatcatttgtaaaaatagcctgttttgcatttgattctaaaactatcccattactaggtttccattgatccttattcatcatttttcttatccaatttattctttacagactcaagtaatctttttaattgttcaggtaaattattgcatagctcttcttcagatatatcttccaaagcagtaaaatgtactaatggttttcctattcctaagaaaagcatattataccatctcattaattctatatcatttttatcataatcaacttcttcctctctttttccttttaaagttctatccaaaatttttttgcgttcatccgctttggtctttggacttcctgatgctattcctttatatttatccagaaaagctgctaacatcataaaatccaaatctaaaggaaaggaaaagaaaacatcatacttttctagttgtttcgtcaaatccaacaaattatttttattttctgctaaatcggcgcatttgttttctattttttctaattcgtcatcattaggattaaatcgcttcaactcatcaataatatctttaattcttttctttccgcctaaatatctcccataatcaagatctaacaaagttatatgtgctatatttaagctttctaataaatcccacaaataattaaccattcgtccagctaaaggtacaattgatatgtttgcttcatctaaaccagtatacgaactaattattttcgataaaactatttcttcactctcgccttcacctaatattactaattttgaaaaatacaattctgggtaagtttgaaccgctcttttaataaatttatatttttctcctttgtcatcaggcaattttattttcttcacttctgtcacggcatcttttgtcaaatgaaaatagcgtacattctctggcaatactctttttattattgctggagaatgagaggtgattatagtttgtgtattatctaatttagttatgcttttaactttatccattacttttccaagtaaatgaggagaaatatgattttctggctcttctaatgcaaatattgttacaacaggatattcaatttttatatcatcctcttgtaccgtattttctattgctaaaacacttgcaatattagaaatataaaacaatgattttattccgtcactcatttcatccacagaaaatacattattagttacatttgaattaaattcaaaccgtatacgactcataatcttattgatatctatgctagatacactagcttttacattagaaaatctagaattaggttctagacttttccattcttgatttaaagtatcttgtattaatttacttcctttttcgtcccaaaatgtatcatttaattgtgatgaaatgcttactatcttttgtttaatttcatcatcccaattaactctttttatcaattgagaaatcattccatctgaggtattacttaattgtcgttcaggatttctaactgcaggtacataaatgaactgtatactgcttaactctgatcttctagctactatcttattttcttcattattatcttctagagaagtcatgaagtaaatatttgtatctactgttccatcagcaattcctgaattcgtccaagtagattcaagtctaattcgtaaaagcggcttatcttgtccgttttttatgattagccgattccaatactgtgcttcacacttcttatcttcgtctttattagctttatctaactcaaaaacagcttcaatatataggtccctcgattgactatcttgatttgctgaatttatataaaaatctgattcatgtattattctatccgatgcattatatgagaataatttattaagtgcaagaagacaggctgttttccctgaaccatttgtaccaataaatgctgtttcttttgaaaaatcaattttcgtttcttcattgaacgatttaaatcccttaattagtaatgtctttagtctcaatctaatccccctcatctataatatatcgttattcaaatacacttaactaatgccactattcttaattttactctttttatcaaaaatcattatttaaatattcaaaaaattttatttccggatttaaaattgaagtgcaacaccaagtgttaaacaaaaaggccacgaagacctaaacttgaagtgacgaaaaatcaagaaaggaagatcttcatgaccaactcaaattctagcatttctaagcactatcatcaattaaatatcgtacagcgttggtgaattcaaacaatattgatgtctatgaagctcaaaagacgcaggaacaagcgtcatcacaaccacgacggtcacgctttgcacaaaaagcatcttggcaattccattgaacagcgtcctaggagattgcaaacagaaaagctccgctgcactgggaaggagatctggttaaaggcgtcagacgcaagaatcagcctgctttaatgactttgactgaaagaaccacatgctttaagtagttatcaagattcctgactatcgggcaagcacatgccaaaggctgccagatgatctattttgctcacccatattctccatgggaaaggggcaccaatgagaactgcaatggtcttttgcgtcaattcttccctaaatgcaaaagtatgaaagacaagtcagctgcttatgttcatgccattaaccacaaacatatccaaatcttccaatatcagacagcagaagaaatcttcaagcaatatgtttcttcatagcctaactgttgcacttaatttgacaattcaacactttcaacctttagctatatcaatctaatctattccaaattagattatcagtaagcggaatagactggagtcttatttgttcatcaaagtttttacattcttttcttaaaataagtactggtctaacatcatttaaaaatttcaaatttccttcatttatcttattatgaaattctcggtttagctcaaacttacttattacgtgattttcaatatccttcatttcatttattggcaatttcttacttaatttataaagatctaaatagtaaataaagtctgctttaatttcatcattccatttttttacatttgttgctggaaatataatattagacaaaaaaattctatatgaattatcatactgtgctttattttcaaaatattcaaaatttttatttgcatgttttaaatacaaattagttctcatacgatcattttcatataaaaaatattttatactatgtggattagaaaatatcttgcattcagtaatcgcataggcttgatcatcatctataagaattatatcaatttctttttttcctgatttatcacttattgtatttttctttttttctatactatatccagactgttttaaaaattctattacataatcttcaaaccaatgccctttcttattactccatttattagtattttccataagtcttgtaactaaatatactggatccacacaataacaagttggtaaatagacaatattgccaaatataaacggagcatccattatatctctatgatacgtcaacttttttgtgattttaccgaaactgtcaaatcttttgtgtaaatagatctttctcgtaaattgattttttaattatttatttaatcaaagtaggattctaaggtgtcctgaacctgaccaaagcctttatgaattcgattgaaataacggtcattgtagctcattgcctgaatgccaataaaagcatcaagcgactgttcagttggaaactctgccttaggcttagctttgcgcttgatcacattgttaaatgattcaatcatgttagtcgaataaattgaagctctgatctgcttgggatagttataaaagaccagcagatctggttctatgtctttcaagcttctgataacatggctgtaaaccttgccccatttggtatagaagtcatgcaggacagctgtggcttcttctttgtttgtctgttgatgcacctgtttgaattcgttcatgatcttttcacgatcgtcgacgcgtactttagcgcagatattgcgcatgacatgaaccaaacagcgttgaaaatgagctttaggataagtcctggccaaggctgttttcatgccaacaacaccatcagaaagaaaaagctcaacttgctttaagcctcgggatttcatgttttgaagcatatctgtccagacttcaatgttctcgctaggtgcaatgcagtagtcaatgacctccttgtgcccattaggcttgatgccaatggcaatatagactgcttcacgctcaaatgtttctcggcgcaaaggaaggtatgtcgcatccaaatagacgcagaaaaacttgtcgcttagcttgcgtttgtggtaagcctcaacctttggaatcatctgcttggaaatatttgatacctgggctggactgtaatggctgccatacatcttttcaattagatcggctatttccctggtggtcacgcccttggagtaaagcttgataatcatgctttccaagatatccgagtgctgcttgtagtcaggcagcgtgtgatgatgaaattgaccgttgcgatcccgaggcacttgcacttcaattgggccaaattgcgtatgaactttgcggaaataagcaccatttctagagttgccagtattccagccatttctggcatagggatcatagcccagaaaggcagtcaattcagcttctaacaagttattaacagcctgttgtagctctttgcgcaataaatcatttattttgtctggattgaatagagcttgagcaaaatctttggtaaaatcattcatgaaggagttcttctttctgtatgtgtttttttgttcaaaccaatcatacgagaaaggaactcctttttctaatgtttaaagaaataaatttaaggaatcattcatccttacacaaaatattttacggtctcattttagaaactgtcaaatcttttgtgtaaatagttctttctcgtaaattgattttttaattatttatttaatcaaagtaggattctaaggtgtcctgaacctgaccaaagcctttatgaattcgattgaaataacggtcattgtagctcattgcctggatgccaataaatgcatcaagcgactgttcagttggaaactctgccttaggcttagctttgcgcttgatcacattgttaaatgattcaatcatgttagtcgaataaattgaagctctgatctgcttgggatagttataaaagaccagcagatctggttctatgtctttcaagcttctgataacatggctgtaaaccttgccccatttggtatagaagtcatgcaggacagctgtggcttcttctttgtttgtctgttgatgcacctgtttgaattcgttcatgatcttttcacgatcgtcgacgcgtactttagcgcagatattgcgcatgacatgaaccaaacagcgttgaaaatgagcttttggataagtctgagctaaggctgttttcatgccaacaacaccatcagaaagaaaaagctcaacttgctttaagcctcgggatttcatgttttgaagcatatctgtccagacttcaatgttctcgctaggcgcaatgcagtagtcaatgacctccttgtgcccattaggcttgatgccaatggcaatatagactgcttcacgctcaaatgtttctcggcgcaaaggaaggtatgtcgcatccaaatagacgcagaaaaacttgtcgcttagcttgcgtttgtggtaagcctcaacctttggaatcatctgcttggaaatatttgatacctgagctggactgtaatggctgccatacatcttttcaattagatcggctatttccctggtggtcacgcccttggagtaaagcttgataatcatgctttccaagatatccgagtgctgcttgtagtcaggcagcgtgtgctgatgaaattgaccgttgcgatcccgaggcacttgcacttcaattgggccaaattgcgtatcaactttgcggaaataagcaccatttctagagttgccagtattccagccatttctggcatagggatcatagcccagaaaggcagtcaattcagcttctagcaagttattaacagcctgttgtagttctttgcgcaataaatcatttattttgtctggattgaatagagcttgagcaaaatctttggtaaaatcattcatgaaggagttcttctttctgtatgtgttttttttgttcaaaccaatcatacgagaaaggaactcctttttctaatgtttaaagaaataaatttaaggaatcattcatccttacacaaactattttacagtctcttaaataatcattaattatagactttcttatatcagttgctgtatttcctggtctatcttgtaaataaaaagcgagggctttatcataatatgatactttcttcgctctagacaacgcaaccaaatataacaaaaaatccgtataactcacgtgtttagggaaactaacattttttagcaattgggttttataaagttttgcatgcggtgaaacttgaaaaaaagaaacatactaacctagtgttggatcatgaatcgacggattcacgatctggcactttttattttgtctaaaatagaaagtgaagataaagcaaatcaagtcttcagctttttagacacttgatgtcgtaaaagaaacggactgctttaccacctattcttaagtctcttcgaagtctgtgggcacttagatgccgtgtttagaaaattagaattaataggttgataaagaggtttatcttcacagcggaggttatattatggaatcacaaattattttcggtattgatgttagcagtaaatcttccacagtttgtgtggttaatgaccggatcaaacaaggcgaatcttttagaatctctaatgattcctttggctatcaaaaactttatgagcaactgaaccaatatttgataactcctttagttgttttcgaagctactggtgtttattctctaagcctgcaagctttcttagaggattatcatattaagtatttgaagcttaatccgcttaaagcgaaaaagctaatggacaataatttacgccataataaaactgataaggtagatgcttatcgcctggctttaattcaatttaatgccccgcaaaagctgcgtgatccacagcccagagagtatcatgaacttcagaatgccagtcgctattatgaagaacttactaggagtatagttactactaaaaatcaattgcaccgcaacctccaatccactttcccacaaattgaagaaatactgtctcatccatctggcagaatttattgggcgcttgttagtcttttcccacatgctggatatgttctagaaaagaatgagacacaggtaactcaaatgcttaattctatttctggaataggacaacaaagggcacggtacttaaccacaagattatacgcttttgctagagaagcttatccttatgattccaaagatagtattatcgttagagctattcaaaggaacatttctaatttattttcactccagcaagaacgcgactatgtaattaactacatggaaaagctggctaaagcagtaaacgctcgtgctttatccatctatttgagtatcccaggggttgctagaattacagcagtgagattagtagcagagcttggtgatctaagacggtttagcacttcagctcaaattgatgcgtttgttggcattgatccaggaaggtaccaatctggtgaaaaagacagttctcttggcattaccaagcatggcaatcatattgccagaaaaatactttatcgagttattactcaaatggagacggtaaaggctacgcagccttgccatataactgattattatgacaagaaaaaacgatcttcaaatagacaaggctataagaaaatcgccattgcatcagtccataaactgatacgcacaatgtttgctcttatcaaacatgatcaattatatgattacaacatagccaccgaaaataaaagactttagctgaaatcaaataatcaacttaagtataagcaacctatggaaaaactacaagtattcataggcttatttgtggtactttcgctttttcttaaatttaaactcttatttgctttaaccttattcgcatcattaaaacaagtaaatttattttcttaaatcattgataatacttgactttgggtagaaaaacagctgtatatcctgtgtttctgaatatacttttttaggttcaatactttctaaatatcctggtttcacagaacatttatgagcacttccatcatcagcatacacatcaaatcgatcccctactacaatatcagtgtcattatttttggcaaatgtataaagtacttctaaacaatcttcttccaaccaatcatcaggatcacacaccaaaaagtaatcagaattaatactatttatagctaactctaacgctgaaccatagccaccattttctttatcaattactttaattctattatctttcgcagcacattctttcgcatacttactagaattatctggcgatccatcattaatagccaaaacttcaaaattactgtatgtctgattttctaatgactcaaaacatttttttacgtatttttcaacattatacattggaacaattacggttatgtctgatttcattattttattaccccaaataaattttcttcaacttttcagcagtatttctaatatcgtatccttgtttttttaaaaaatttgtattttctgctcgatcatacttcctggatagtaactttaaactttgcttataccactctttaagcgataaatttaagtcaagaaacatcacgttatcagtaaccttaatatctagaggaacattagtggaagctaataccggaagcccagcatcctgagcctcaatacttgcaattcctagtccttcatattcagaaggaaaaataaataaatccattgcttgtagataatcttcaacattatctacatttcctattaattgaacatatttctctaatcgattttgcttaatactcattcgtattgatttttcctgtggaccagctcctataagtaacagcttagccttagtattatttttaataaaataacttaataattttattaaaaatatttgatttttctcaggtgatagccttccaacatgcccaattagtatttcatgatctgaaatattcaatttgttacgataatgttctctagtcccaatattatatgcatactgctgtatgttaattccatttttcaaaattcttccttttttgttaaaaattttttttgaaaattgccaatatgcagctttttttgttggagcaaccaaaacgtcagcatatttactaaagattggtgcataaatctttttaattacttcatgctttacatttttattttttcctgacatgtgcgaatgcacaataacttttttcacacctgcttttttagcatacaaggtaaataatgcaagtatagatatacttccactatttatatgcacaacatcatattgattatctagcagaatttttttatatgcatttacaacattaaatctattctttccaacattaaaaggtaaattaaaagagtatagcgtagaatttagtgatttaataaagctaatatagtcgggattatcagcataatatggtgttaaaaaatcgaattttagaccttttttgttcatattttcaattgttctaaatacaaaagcctcttgcccgccatacaaaattggctcaccaaacgcctctaaaatctttttcatactatccaactttctacatttttattttatatactctatagacggattaaaacgtaatccctcaattgttcctttaaatatcatctttaaccttttacgtttattatttttagctttgaacaaaacccttatcatgtgatcatttaaacgtaaaaattcatatccatatccttttagcccttcctttctataaaagaaaaaatcattcctatacaaatatctatatctttctattctttctgggacatctgttgcaatgtttgcaccaacattagtttttgttttatgtacaacaatactattagttacaacataacattcatattttgaggaaattcgtcttgtatattcccaatcatcagtccaaataaagaattccttaattggtaaccctacttttttgataactgaaactggaacaaataaggaaacaaaagaagctaaagtaacaggtatcaattcagatgaaaaatcagacacattttttgttaatgtccttctctgaatattcatcgtacacaaggtattatcggtccacaaagttttactagacaaaaaaccataatcatgatttagttttatatctgccttaagaaactcattcaaagcatttttagttggtatgcaatcatcatccataatccaaacaaaatcataatccttttgagctaccatctttataccatactgaaatccaccagcaccaccaagatttttccccgtattaacatagtttatactgttatcatcaatatattttgcaatataattaactgtaccatctgtactattattatcaataatatatatatctggctttgcggtttgttccaataagcttttaatacattcttttagtaacttttttctattatatgttactacaatagcggcaacttgctgtttcctcataaactttaattctcctttttattcataaagctaactacagaaataaaacttaataaaaatggtactattagaaatctaaatggatcatacatattttgtgacattatactagttaatgcagtagtgcaagttagtaaaaacaaaaacttattttgaacaaatttgactttttttaagcttacatataatcccattacaaatggcgatataaaaatagcaaaacctattattccatattgaaataacatagataatatacctaaatctgattggtttaccatatgtgtatccaatatattaaaataattcccatcgtttgatataccatatccccaccatacacctctttctatccaaagagtttgatatgtatttaatgtcatcattcttatttgagtactagatccatagtctgcatttgaagttgaaaaagtattaaccaatttatttaagtaatttcctctaaaaataattggactaatggctatagctcctaccacatctagagctttacttttaaaagtatcactaacgataagtatgaataccactaaacttaataaataggctatttgttgtgaacgtgagtcatacacaatatatgcatataaaaagcataatactataactgagatattacgtgttttaattacaacacttttttctttgatgattttgaaaagagccataacccatacgtaattatctaaaaaagtacctggtaatctacttactccatttctcgcccaagcaaatcccattacttcaaaataacctggagctacattcatacgtaatttattgtacaaaaaccacgcgctaaatctaaatattaatatagcaacccccatataatatatattattaataaatttcattcttcgtttagcagtcgctagcacctccgtcatcggaaacgttaacaacatatacgcataatatctattatgaattaaagcatctttaattgtgtacccagataaggaaaaactatttagcctatataactgtagcccaaacataaaaataaaaacgcctatataaatagatacatatctgagactgtaaaatagtttgtgtaaggatgaatgattccttaaatttatttctttaaacattagaaaaaggagttcctttctcgtatgattggtttgaacaaaaaaaacacatacagaaagaagaactccttcatgaatgattttaccaaagattttgctcaagctctattcaatccagacaaaataaatgatttattgcgcaaagaactacaacaggctgttaataacttgctagaagctgaattgactgcctttctgggctatgatccctatgccagaaatggctggaatactggcaactctagaaatggtgcttatttccgcaaagttgatacgcaatttggcccaattgaagtgcaagtgcctcgggatcgcaacggtcaatttcatcagcacacgctgcctgactacaagcagcactcggatatcttggaaagcatgattatcaagctttactccaagggcgtgaccaccagggaaatagccgatctaattgaaaagatgtatggcagccattacagtccagctcaggtatcaaatatttccaagcagatgattccaaaggttgaggcttaccacaaacgcaagctaagcgacaagtttttctgcgtctatttggatgcgacataccttcctttgcgccgagaaacgtttgagcgtgaagcagtctatattgccattggcattaaacctaatggacataaggaagtcattgactactgcattgctcctagtgagaacattgaagtctggacagagatgcttcaaaacatgaagtccagaggcttgaagcaagttgaactctttctttctgatggtgttgttggcatgaaaacagccttggccaggacttatcctaaagctcattttcaacgctgtttggttcatgtcatgcgcaatatctgcgctaaagtacgcgtcgacgatcgtgaaaagatcatgaacgaattcaaacaggtgcatcaacagacaaacaaagaagaagccacagctgtcctgcatgacttctataccaaatggggcaaggtttacagccatgttatcagaagcttgaaagacatagaaccagatctgctggtcttttataactatcccaagcagatcagagcttcaatttattcgactaacatgattgaatcatttaacaatgtgatcaagcgcaaagctaagcctaaggcagagtttccaactgaacagtcgcttgatgcttttattggtattcaggcaatgagctacaatgaccgttatttcaatcgaattcataaaggctttggtcaggttcaggacaccttagaatcctactttgattaaataaataattaaaaaatcaatttacgagaaagaactatttacacaaaagatttgacagtttcacatatcttgaaacttttatttctctatttttttgatttacataaataaaatacagtaaaacagatataacaacacctatactaatacttaaagaatttaagtctttaaaaaagttgataaaacctaaatataaaaaaactataaggtaaattgaatattcatacagttttactgttttccatctcatattttttctcataccaaattaaaaatgtgttttcgtttttatacctatttttcgtttaattaaagaaaagcctttctttaaagtattctttccaccaatttgtccccaaggaacttctacataagtaaatgaattggtaccaagccaaacatccattaacaactcagaaatatatccaaatactctcgcttcttgcacagaatattcagaaatattaatgctattttctagcttacttagaacatcaaacatgaagctacaatatgattcaaatgcattccttttcataataaacatattaaacatatgagccccacgctttttcataactttatcaaaagcaggaagataatttggatatacttcagcaattacctttcttgcttcatccaaaggctctttatgatgtgcatgaatgtaatgtgaataattagtttcaatataataatttctttttttaggtaaaattacatcatatttttgtaaaagctgatttactttctcaatactaattacattatctaaagaatatggtcttttctcaaagagtaatcttctatagtgaactaatccaatagcgtcaacatcttttaaattcttccaagcccaataaacagcagttagttcattgtaattaggatttttagaggatatattttcaccatcatcatcacgctgataggaaatacctggtttataattctttactgcgcctactaatactggtaaatatccttcctttttgggcataggaaactctttatgcgcagcaaccaaaatttctattttcaaagactcttctcctgatcaatacgctccattaggatgaataaccaccccaattgtcttaacaatcaacttcaaatcttcccacaaaccggaatggttgatatacacaatatcaagccaaaccatttcgtcaaagtcagcttcactacggcgtgttacctgccacaagccagtacaacctggcataacgagcaaacgttgcttatcgtagtcagtatactcagctacttcagagggtagagggggccgtggaccgactagtgacatatcgccgatcaagacattccacagttgtggcaattcatcaagactatacttgcgaattgtatgtccgatcttcgtaattcttggatcgtccttgatcttgaacattgcgccgtcaatttcgttctgatcttctagttcatcaagcatttgatcagcgttaacgaccattgaacggaacttccacatcttgaacggcttctcatctttaccgattcgttcttgagaataaaatgcaggaccaccatcttcatgtcttatttttattatcaaaaataaaaataacggagatagtaaaattaacccaagtgcgctagctagtatatcaaatatccccttaatcgtgtgatacactggtcgtccgttaacttttgcaggattaacttgtagtttatcatactcctcttaccctctgtttgatttagtctatttgaatacactctcttattaatcttatcacgtttaacgcaacttagaagcaaacttgcatatttgcaccaagcattaaaataaccagaactttttcttctgcttcaatgggtgccaatccatctgaactgggtcgccattgatgatacttctagcattatcttgccactgctgagctagatcttgactgaattcttgactcatctttttataagcttcactcaattgatactgccgtcttggcaagtcgtgtgcgtcgctagcaaaggtgcatccctgccccgtcgcaatcaacttacgcgacatctcttcgattttcttgccaaagattcctgtataagagctagcagtaatttgcaccaagcagccttgttccagcatcccttgcaaaatttccggttccttcaagatgcgactattgcgctctgggtgtacgataatcggcgtcaccccgcgctgcatgatcttgaagatcgtgtcttgcgcataagttggcacgtcctcacttggaaattccaacagcatataagtaccgtcttcatcgcagaacaggatatcatcgttatcaagcgcatcaattaagtcacccgacaagcgaacttcctgccctgggaaaaccgtcaacggcaccttggcctcatctagcttctgttggtagagatcagtcagccagacgatatcatccttatggttagtgtaacgaccattcagtgtatgcggcgtacaaattgcatgcgttacgccatctttgaccgcagccttggctaacttaattgaagtgtcccaattttttgagccatcatcaatgccaggcaagatgtggcagtgaatatcgactaaaaccattattgatcgtcactcttttttctaccgaacaggccctttttcttctcagcgccatatccataaccatagccatacccgtagccgtaaccatagccaccgttttcagctctaatgtcgttcatgacgtagcctagaatccgagctttggcaaattttaacatttgcactgctctagtaatcccagccttttgcgtaacgccttgacgtactactaagactacgccgtcaaggtgactagccaactcttgcgtatcggatacttcaagaacaggagctaagtcaatgataaccatatcataatgtgacttaaccaattcaatgaaggtttccattctgcgtgaaccaatcaattcagctgggtttggtggaatcggaccagaagtcaagattgacaagttatcaattccactttcttcaaccacatcatttaaattgattgcgtcagcttctgaagtaagaacagttgtcaaaccagtattgttcttaacgttgaacgtactgtgcaaagttggacgacgcaagtcggcatcgattagcaaggtcttgcgacctgcttgtgcataggtgatcgctacgttggccgtaacggttgacttaccttcactgatgttagctgaagtaaaagctaaggtactaatttcttcatcaactgccataaagttgatgttagtccggatagttctgaattgttcagataccgcactacgaggatcagcaactgtgattaatttggcaccatgcttaattgtatcgtcggtaccacgcttttttctaaataatgccatttacttctcctctcctatactcgacggcttctacgcttagggccattagaattcttattcttttttctaatgacaaatgatgatgacacatggaagtgtgaaacttgacctaagtcaactaaacctaagttatcagtcaagaatgcatcatccttaactgtagtgtcggacatttcacgaattaagactactgcgaaacttaaaaccaagccaataacaaagccagccaaggtaaagagtttcacattaggtgatgattgattaccatcagttgctggcgcaacgatcgtaacgttgttaatgttcatgatgttaggaatttgatctctgaatgaacgcgctacagcgttagcttcaacctttgccttttcaggtgtatctgcagtagcagaaattgagaagacctgtgattgttgttgagtattaactgaaacgctcttggctaattcgctagtagaaacgctgtaactcttaccgctacgttcaactacttctggttgagcctttcttactaatactcggcgaccctctgcattagtcttgtacttagcaggtttagcctttttaaccactctaactgggttagctaaacgattagaagcatcttgcaaaataacatgactagttacaatatccttataggtagtaaccatttgcatgttggcttgttgagtattatatgccgcattcgggtcattcttgttagccttttggttaaccaagatctgtgcattagaagtatactttggtgaaataataaaattagcgacgccccagccgactaaagccaaaccaacactccagataatcagtgcccagatgtggcgacggcaaatttgtagcaattgagtaagatcaattgtattttcagtttgcttttgctcttgttccatttaccttttcctttaataacgattaacgattcataatatagctagccttgttagcagctaccttaacatgtggcaattctagcgccgttctgatcttatcagaaactcgttgacgctcttctctacttaccacttcaatttccatagtgccaaacttagggttttgcgtttctttacttacaccctgagcatgatcttgagaaagattgttagtggcttttctataatccatagcaatcttgtacatttgattcatagtcaagtcagtctgcatctcgctagaaatggaattcaagaaacttgaattaagcaaagttgaaggtgaaacagacttcttaagcaaggccataattaccaagcggtcacgctcttgtctaccataatcctgacgagggtcaccatgacgaagttgggcaaatgctaaagcctttttaccattcatgtgataagtctggcctttgacaaagctataacccatattgttgaaagttaatggagaagttacatcaatccccccaacttggtcaattgccttcttcaaaccacccatattgatcatgatgtagccgtcaattggaacactgtaatatttatcaagtgtcttaatagtttcactaactccacccaatgtataagctgagttgatcttggttacaccatattgtgggtaatctgggaagattgcatttgagtcacgtggaattgaaacaatgcttgtactattagtcttagggttgattgacatcatcatgatggtatcagttctacccttccagtgacgacccatggcaccagtatctgtacccaataacaggatattaattggctttttctcattcagtaaattatcaagagtacgtcctttattactcttggtagtcttagcaacgggagtgtacatattctgcgtcgtatcacgcaaatttttgtagatcatcccgcaaacaaaaagaccgactacaatgatcacgccaataataatccaaaaaccgcgccagaacttacggtgacgacggtggtgatgatggcgatgacaatgtatcggtttattacttgattctgcgttattttccattctaatcctcttaatcttataatcgttattattatatactcaagaacccattttgaccacccttaaaaggtttacatgcggcaaatacttaaaaggaggctcgttttattgctgttttgggttgctgaaataatatattttggtagatgtctaacatgtaataaaaaatgcatccctcgaaaaatggaatgcattgctgctagattgagtttaaacggaattatttttcatcttactatcgccttgccttaaattgtactcacactgtaccatatttagtaagacctaaataaccaaaaagtattaagaagtacattaaatagaagttggatagcatgttaagtattgaagaatcaatcaaagaatttgaaacatattttcagggtaaaccaaatgaagttgaagtagtatcacgaactataaaacaaaaaagtagacggccacataaaccgcctactttatcctaattgttatgatgatcacttgagttagttaaatcatcatttttagttagatcatctatatttccaactactccaccaaatagtgtaaacacacctattccaccaaaaatactaccagccaccgaatgcctttgcatcaccaaaaaagcagaaatacaaatacatagaattgttactattgatactactatcagagatgtccatgcgagccaacctcttcttttttgactagcaacttctaatctccgtctatgcctactttcttcaacaccattattaaattatttccttagcagcattcggatacaatttttggtatccctcaagaatatcaggaagcggaattggtccactatgcatctcaagataagccattatttcttttttggtttctttaggcatctcagatttttgaatttgatcaagaatctattcatctagcgaatctttatctgactttttctttatatcattttctagctttttacttggcttttgatctgccataagatattattccctttcttaagtcgtcccctatcctttgccaatcactggcaatagctttttcctcagcattactattactagaatatatcaacttgtttaataatttgacataaggcatagctacatttttcgataattttttaaacactaattgaatatcggtaaacataattctcacctcattcataatctctttctttattaaaagtatacttaaaatttgactcgtggtaaagattattcttctacatgcgatccacttctttccttattataagcatctgtaatacaataaacttaacagcaaataacgaggtgtttttatgattgataatcaacctaaaaagacaaaagcttatatcgcgggcgtaaacttaaacgaccaaaacttcgactactacatgaccgagctggccaacttgactgaagccaacaacatggaagtagttgggcaaagctttcaaaatgcagaatcaattgtcgccggaacttacttcggtgtcggcaaaatcaatgaaattagaactatggctcaaggcttaaaagcaaaagttttagtccttaatgacaaattgactcccgtacaaattcgcaacttagaaaaattaaccaaaatgcgagttattgaccgcacggaattaattctggaaatttttgccagccgcgctcgaactaaacaagctaaattacaagtgcaactggcacgtttacaatatgaattgccgcgtctccatccctccgagaacaacttggaccagcagcgtggtggtggcttcgctaaccgtggtgccggtgaaagtaaactagaattgaaccggcggacaattggcaagcaaatttcggctatcaagaaggaattgaaggctgttgccggccaggaagaaatcaaagcggcacgacgcaaccaaagtcgcatccctaaagtcgctctcgttggctacaccaatgccggtaaatcaaccacaatgaacggactattgcgtgaattttctaaagaaggagccgacaaggaagtcttcgttaaaaacatgctttttgctacgctagatacttccgtgcggcggatcaacttgaaagacaactttagcttcattctgtctgacactgtcggtttcatttctaaactgccccacaacttggttgaatccttcaaggctaccctgcaagaaacgcgtgatgctgatttattaatcaacgttgttgacgcctctgacccgaacatggtccaaatgattcggacaacacagaacgttttggatgaaattggcgttaaggaaattccgatgattaccgcctacaacaaggctgataagactgatcgcaattacccacagatcgaaggcgacgacattctttattccgccatcgatccaaaatcgatcaaactactggccaacttgatcaccaagcgcgtttttgccaactataaaaagtttgacttgatcctgccactaagcgcaggcaaggaactggcttacctgcatgatcgcgcccaagttttacgtgaagactaccaagacgatggcgtccacatcgaagcgaacatcgcgcccgacgaccaaggacgctttcgtcaatatttggcctaactcgattaggaaaaaatatgaaaaaacataatctgctgttcctttttgccctcacatttttgttagttcctactaacacgcctgtaatggctgctaaatatagtgctagtgagtcaaaaaaggtgcgcacttttcaaaaaagctatcatcgtttgagccagaagaattacaatcagactacgctctttaccgtgcagccaaattttggtattcctttttcagcaggagtgcttgaccctgattacatcaaaacttcaatggcttatgtcaattattaccgctcattggttggactgcctgatgacgccaattatgctaatgataacgttaacgcacaacttggtgctgcagcgctagcttcagttaacgcggagcaaaatctgcgagcccatggtttacaaggttacgtcaagcctggctatatcagtgatactgactgggatacagcggaaaatactacattgggcaatatcaatttttcagaatcaactagcggaaccacggctggcgagatcgttaccgatctgatacgtgaagataataatattgcaggtaatggcaacatcggtcaccgcggcatgatcctctcgacgcgagccacccgaatgggaatcggcgcagcttatggcaccgaaaacaacgtcttgtattctgttgaacatggactatttgccgatgatattttgcgccagcctgtaaaaagccgaatcgtttatccagctgccggcgtttttccttacgaattagttggtggtaaaacgccatggtcttactcaacaaccgagcgaatttctggtcagccgaaaatttacatcacggatttgaccaccaagaaaaagcggcaagcgacgcaggtgcgcaacttcggcactgctctttatggtgacggctacacaacgacaatcacttaccgacctggcaaaaccaagttgatcagcacgcacaagtaccgtgtgcaaatcggcaaacattatagctacagtttcaaatttttcaggcaaaatagcacattgaaaaataaacagattgtaaagcatcgaaaatgaaatacgttgatatgcaaaacggctcaagcagttgtacatcctgcttgagccgttttagatagtaacaaatattgtagtctgttcaacaatcttcatgtaaaataatactcaggtctattgcagcggttagctaccgctaagacttagtaattttagcatggctacacacccctcaagattttttaagttacggaggtggaagcatgcataattgggtagactggagaagtaggcttacaaatgattgcttgggctattgcgtatgcgataacaaaaaaagctaatcacaaggattagccgaaacaacagtcatcttaagttacgattggagttagcgaccgacactcgctagctccttttcttttattattttaatatgatttagaatttattgcaatgtttagaagtgcttattctacgccaatgacgtaacgcatgatgaatcaatagcttgttgtaccaagcataattgtgcttcatataattataggcggtggcaaagttatccaattgtcccgccgcgataaattgattgcgtgtccaatgccaatcctgagtaggataatacaaaattttcactcggattacccttcctactgtaataattgcccgatcatgatgataacgcgtgcgagcaacattgaggtagctaccaattaaagtattgcgccagtatcgattatgcagataatttttctcccaaagtaaggccttgcgcaataccttagaaatgcagtaccattcgcgtttgccgttaggcaattcaaccaaacaccaaagatattggtgtctcttcgccattcaatccaccccttctaattaatatcggctttaattataccgctactagctattcagttagaaaatcaataatgtcagaaaatattaggtcatgatgtcaaatctattcaactgacatcatttgtcctaagaacgcatttaccgcttgcttaatatactcgctgcaaaggtgagtatactgcgttgaatttctggacatggctctgcttaaacggtcttgatgggtgtcattttaatccttctttaatttttactataattttctccacactgaaaactatggcaaaaaaagtagaatttttcagtctagggaaaacttttatcaatacaaaaaagcaagcgcattaatcgcctgcctaaaagtattccaaattacttctctatagtactctcttagcaattgatggtgtaaagtaactcgataccgtttgcaaaatagtaccttgctctggtgttgctgcatttacatattgattgtttcctacataaattgcaacgtggtatggagctgtcgttgaaccccagaagactaagtcacctggctgcaagttgttcaatgaaacagtttgaccaaccttaacttgatcataagttgttcttggtaagttcacgccagccgctttttggtaaacatattgtactaagccagaacagtcaaatgaatccggaccttctgcaccccagacatagttcttacctatctgttgtttagctagcgcaacaattgaagcggccttactagtagcttgcgttgaagaagtttggttagtattttggctagtcttcttgattgccgtattaacaatttgcttagccttcttcaccttagctatcttttcagccttcttctgagtagccgttttagtagctactgccgctgtcttcttattaacagtagtctttgtctgcttagcttccgttttcttaacagttggtgcttgcgatacttctgctttttctccagcagtaacatctacggtataacgcgcttcaatccattcacgcgttccaaccttgtaccacaagttgcccttcttatcgagtgcagtctcagctacattccagaccgtgccgtccttagcacggtagcccatgaattgaccattctcatagttggtccaaatattcaggctcttacctggtaaatagctaatcttaacttgcttaatcgcagtaaaattagctgcacgaacagttttcattgatgtgattgcggaaacacccgtaacggtcagggctgcagccgctcccactttaaaaaaattatgtttcataattgaatccccttggtagcgaaacaggtgaaaacttttcacctaaaattacccactcttactatgtaacgccttcattattgcatgtcctacctcaagaagcaaattagaacattacaatattacaaaaaagacggatcactggaatccgtcttcattacttactatcttaatttaaaacacgcttagcaacacttgggtagaagtatgaactcaaagtttgcttgattacgccttgacctggtgtagcagcgtggatgtattggttgttaccaacatagatacctacgtgatatggagcacttgcactaccccagaaaagcaaatcacccggttgaagattatccatagaaacggttgatccttgcttaacttgatcataagtagttctacccaacttcacgccagcagcgttagagtaaacatattgtaccaaacctgaacagtcaaaaccgttagttcctgtaccaccccaaacataggacttgcctaattgtgctgaagccaaagtaataactgctgaagcatcaccagttgcttgaactgacttcttagcctttttagctttcttaactgcttgagccttatctgaactagcatcaacagtatattgagctaaaatccattggttatcaccaatttggtaccatgtacggcccttcttatcagtcttggtgtcaaaaacattccaagtagtaccatgttgagcacgttgaccagtaaagtggccaccattgtagttgtcccatatgttaattccataacctgcaatgtagttaatctttactttggtagtagcagcttgaacagtagcattagttgaatctggcttgatgacatttactgcagctacaccggtcagagttaatgcagcagctgcggtaacttttacgaaattgctcttaatattcatcaaattctcctgtatgttttcactatatctataagcattcttagaatttattacttaagctggtaacgaaaatattaattcatcgaaaaatctttaaatttctttaatgtatttaacaaaatctataataatgccccaatgttacagtagtgttacaaaagtaatactgatttaataaatattacgtttccgtcaaaaagaaaaatagctagggagatttccctaactatcttaactagatatcttatttttaggaagactaacgcaattagtcgattacacgcttagctgatgatgggtaaaatgaagctaaggtttgttgcttaacattttgaccaggagctggagcgtgaacaaacttaccgttacctacgtagatacctacatggtagttaccccagaataataagtcacccttcttaagcttcttagttgaaactgaaatggtcttaccaagagtaatttgaccgtaagtagttcttggcaaaattttgttaattgcattcttgtaaacgtagctagttaaacctgagcagtcaaaaccgctaggacctgcagcaccgtaaatgtaaggcttgccgatttgcttcttaacaagcttaacaaccgcattacgctccttagtagtagctgattccttcttaactgaacttgaatcaggattggtagtttcaagatctgaaattgagttgttagtattgatagtagtgcttgaaacatcatcagcgtgaacagctggaacattgatcattgaaataccggcaaagaatactgataaagctgcggtgtattttactaaagtacgtctaaaattcaaaattaattgtctcctctaaaaattactaaatttgtttttgatttcttaaatcagttgacggtttatataataccgactgaatgttacacgaatgtttcaaaagagctaccatcgcgttaagaaacatgttaaaaaaacagattttatgtaaaaaaaggagaagcaaaatgctagcgaagctttgctacaagggcatcgagcgcgtttttagtttctgttaaattgtcgttaactaagatatgagcgtattgcttcaaatcttcaggtaaagcatttaattcactgccgctaagtctttctttaatcttggatggatcatcgccccgctttaaaaggcgctgttttaactcttctttagtagaagttgtaacataaagaaaataagccttgtcacctagctgtttaatgtaggaataaatgcccttgatatcgacaattaatgaaaccagatcactttttttccaggccagattcaaagcttctcgacttgagccatattgataagagccgtacttaatatgctcaaaaaagtgcagctgggcaaaagtttcatcggtttcaaaatgataagaaacattctgctcctcgcctgatcgcatcggccgcgtggtatgcgttaatacgcgtggaataccatatttttcagttaaatattctgaaacagtcgtcttgccagcaccactaggtcctgcaataagaattatttttttcaaaacctgattctccccacttgaaaatgttgcttttttataatagcattcttgtgttataaaagactaagactttttctcggaaggaagatacacataatgaaaaaagcagacgtaaaagttggtgcaatcgttggtgccaagtcagaagaagaacttaagaagccattccaaggcaaagttgaaaagatctacgaaaattccgcattgcttgcaattacttcatacgatcccgttgacaccactgctatcagcgacttgaacaataagatcgtagttaacttcaagaatttaaagactgctcgcgctgccaagaacagcaagactgcttcaactaatgaagttaagattgaaaaaattgccaagaagaacgacgataaaaaagaagcagacaagaagtaaaatttgacaaaaatagcccgcgcaatgtttacgcgagctatttttttgcctaaaattaggacatcgatacgagaggaaatattttatgaaagaaaaaacgcgaactgttttattttggtttattttaatccagccctttttagacctttattggttctacaacggtaaattagcggaagttttaccatttactctacctacgattatccgaattttagctgtttttgtgattttctgtatgtttttcagtcaaaagcaaaattggcaaaaattagggcaagacaagtggttaattctatatttagccctactaattttgtattcgattattcacttaatccacgtcaaaaactttaacagcattaatcctaatgactacaattattcaaccgtaagcgaaattttttatctcattagaatgcttttacctctgatggtgatcttttttacaaaagaattgaatttcagtcaggagcaattcagacacgttatcgaaggcatcagcggacttttttcatttacaattgtcattaccaatctttttgtcatttcgcttagaagctacgagacaggcccgattagcgctaatatttttgaatggtttgttaaccccaatatcggttactcccatatggcctccaaaggcttcttcaattttgccaacatggtatcagccgtactctttatgctggtgcctctgatgctttacttcatgttcagtcgttttaactggaaaatcgtcactttgaacgtagttcaagctttagcgatgatcgagttaggaaccaaagtggccctcatcggtttaatcggtggcgtgattatcagtattttgctgtatgttttccacttatttattgttaaggatgttaacaaaaacggcaaagccattatcgtggcgcttttaatcgaagcgggcacctttgccatcatcccctttggtccagcaatccagcgctataattatgaaaaatatttggctcagcaatccgatgattctttgacacaggccaagcgagaattaaatgctggcttaaaaaaatatcctcaaggtaaacagcgcaaggaatttttaacgaatttcatcggcaatcattatcaagattacgccttaaataagaagtttgtttttaaaagctacccttataaatacgatcctgaattttggctcaaaatcatgaacgagccaggcaccgctagaatgcaaaatcgacatgtagaaaaagcgatgcttgatcaagttgtgaagactaacaataatcgactcgacaagttcctgggcatttcttacacacgagaaaccaacattttcaaccttgaacgtgatttcactagtcaaatttattcacttggttggatcggcatgctgttgttcattgggccttatgtcattatcctgctctacgctttaattaagtggctaatgaacaaagaaaagcggacttatttgatcagctcaatgttgctttcaatcgcctttatgattttcgcagcattctcgtcaggtaacgtaatggacttcttaacagctagcttcatcctggctttcgttgaaggcagcttgttagctagcgtaaccagaaaagaaaattaaacataaaaaaagttaggtagttgcttgcctaactttttcttagtttttaaacattatttttcttgcttaataaagcttgaatctggcacccgaattaagtagtaccgagttgctaaatgacctgcatgcatcccgattccattttgccaattccgcttgtacttagccgtataaattgccacgtaagcacgttgatactttttatccattttagccaattccttttttacataaggaatcttctccgcattcacgtcaagcgcagtgttaccataagcaatcgaagcatagtcactaccaatcgtgaccttgctgccatcgcgataaaaagtataagtttgtgagccatatctcttcttagcagaattaatcgttacatagcttgaatttcccgcacctgtacgcattatcagtggctcatacttcacgcttgaagtaatgcggtttgcatcttccaggtctggattgtccataaaagtctgattaaacatccaacctgcagctaataaaagtactacaatttccacaatattaagagccatattcggccaactaaagcgtttatgctgtttgataatcatcttaatccgtctttgacggatgttctggacgatgaaaactaaataaagaatgatggcaacccaaatcaggatcccaatgatattccagctgaacatatctcgccctgctatataaaacatagaaacatgcagaagttttcatatttctacatgtcagaaagaaatatattttcctttctttgtcttatttactgctgtcttcatcagtattccgatattccatctggggagtaatcgcattgactaactcttgcagcttaagggcttagccagcccattgtttttattttgttaacgctagtaaatttaatactgcattgtcatcacgatcattgctatagccacattcataacaaatgtattcattatgcttggtgccatgttttttattgccctgcagagtaattttgtctgcaccagttttgacatagccacaattggcacatctttgtgttgatggatatgttttatcagctagaattaattctttgccataccattcacacttgtaagtcaagacttgtctaaacttgccaaatagtgacctttgcatgcctttggaggctacatgggtcatcatcatttgtttgacattcaagtcttcaatgacgatttggtcataattgtttacatgctcagtggtaaatttttgcaaaagatcattctgaatattggctgctttgcgataatcacgctgaagcttggttctcacttgcaggtaattattgctttggcttgccgatttaccgttaactcttctctttttagacaatactctttgataatgcttgattcgcttgtacagtttctgtagttttgctggcaaaacattaatcttgccttcagtgtagttgaaatgcccaacgttgacatcgatggcggtctttttgccagttttagcctttagtccagcctcttcttcataggaaagggcagcgtaataatgtcctctttctctaaagatgctggcaattttaacctcttccatctttaatgcctcgtatgctggaatatcaaaccaagatttaatccctctaggcttatctaatctaagcttgccattaattatcttggcgcgatcagttttaaagccttgacgtggagctttcttagatttgaaatgcggcttgccccaatcaggctgggtcttgtcaaagaagttcttccaagcattagccagatccttgactgctaattgcagacagcgagcagacaaagcaaattgccaatcagccttgttattgactaattcatcccacactcgatgctcattaggactaggattattatccttgtctaaagtccaagcttcatacatgtcttgccaggttgctaaagctagattccagcagtatctgcgatagttacaaagacgttcaagttctctttgcattatcttatttggccttaattcgactacctgagttttgatcatttgtttcacctccaatgcaaacataagtttagcaaaggatgtaacaaaaacaagcgaacaaaatattaaatttttagcagcagttaatttgcttctatgttttgcctttctgaacaaattacctgtatctttttctatattgccattaaattctatatttcagctaaccatttaatcctcctttttttcaattatatggtaaaaaaagcaaaatttgaataggataataattgaatacttagttaaatagtgagaagatcttactagtacattagatttattagggaacattatggtagcaatagctttttattcaattactgggcaaacggaacgttttattaagaaaactcaactttcggcccatcaaatcgacgatgccaaccctaagtatgatatgggaaaatcttatatcttaatcgtaccctcatatcaggacttcatgatggattcagtcgttgattttttaacgtataaagataacaaaaaaaatattatagggattatcggttgtggcaaccgaaactttaacgacctctttgctcaaactgccaaaaagatcacggcaacattgaaagtgcctattttgtatcttttggaatttagtggtactaaccaagatgtcaaaaatgtacgaaaaatcgtacacgatctttctgctggtgagagtactaagcaagtccaaaagcctaaggaattacgtgggaatatcagctttttgagtgattttagagattaaatatgactgaaaaatattacaaagcaattaactggaatgacatggaggaccgggttgacaaatctgcttggtcccgcctgaatgatattatctgggaaccccgtaatgttccagttagagaagataaaaaagaatttttacaattagacaagccggtgcaagatgccttgcttcacgcattcggagcactatctttttcatctggactccaaatgaaaaatgggctagagcaaattaaggtagatgccatcacaccagaggaagcagctgtgctgaatgccttgcaatatttggaatctattgccaataaaggctacagctacgttatcaacgagttgacggactcaaatatagcaaaagacgttattaactgggctgatgacaatccttacctgcaaaagaagattcggattttgaataaaatctaccaaggcggggatgcactacaaaagaaggtagctaacgttatcctagagacagctctctatcattctgccttctacgctccgctttatttattcggacaaggcaaaatggtacgaacagctgaaattgttaagttagctttacgtggcacttcatttagtgggatttatcctggttacaagttccgcttaggctaccaaaaattaggtaaaactgagcaagcagagctaaaagaatggatcgataacttgtacgatgtgctaattgataatgagaagaagcacattgagttaatgtacaagggcactgactggatcgatgatgttacgcactatctctactacagtgtcaacaaggcctacctcaacctaggtttttcagccaagtatcctgacacttctgattcaatcaaccctattattgaaaaaggggtcatcaagaatgcagtgcttgaagacttcttcttctacactaacgatcactcgctgactaagtttaaagaaattaaataattacaaaagacgcaatcgaaaattcggttgcgtctttttttacttcttagtagttttcttggttgcctttttagtagcggttttcttttctgcttcctttttttcaggcttcttatattcacgtattgtggttagcttttcaataattgcctccaccagttgatcaacaatcttcgctggatcttgttcgatctctacttcactggctaattgatcaattctaaagcctgaaacattaacgtattcagagcgcgtttcaaagtaaacatttaaaggatattccttaccctcttcaaagaagttagcaactcgtttgtaattgctataaggcaaattgataatatttgtctccaaggcaaaagtagccggccgctgacccgtcactgctagttgcgtttggatcaatgaattatgcttaaaagcagcgataacttccttgaccatcttttcagcatacggcttgattttgctcttcgacttgctaatgtcggcatatttaactgtttcaagatcttgaatataatcttgattttcaattttttcgttgagatcttttaaattaatttccaaaataaactttcctttttcattggttataattacaaaatactacaaaaaaattttttgtcatcctttttaaggattcaattcagtatttttagctttttatttgttaaaatgacactatgaaaaagcaaaaatttgatcttaagtatttatttttactcattcccattacgttaattctcattataggattgatttacctttttaacaaaaataaaatcgataatgaaattaattggatgacaatgaaggaagaacagcggctcaatgtcccgctagaaaatcaactgcccgatctacccaacggctgcgaggttactagcctatcaatgttactgaattactatgacattaaggttaacaaatatgatctcgccgataatattgctcatgttgattctttcaccgacaacggtaaatatcgcggcaaccccaatcaaggctttgtcggccatatgtctgtcgctaatgctggctggtgcgtttatcatgggcctttatttgacgttgcacgtaaatataccagccacatagaagatgcctctggcagcaattttttagcgattctcaagttaatctccgatgggcatcccgtgctgatcattaccacaaccacttttaatcatgttaacaatatgcaaacatgggaaaccaatactggtaaagtcaacgttacaccgtcatcacatgcctgcgtgatcacgggatacaacaagcaaaagaagcttgtctatgttaataatccttacggtattaaaaaccaaccggttaattggcataacttagaattgagttatgaccaacaaggacgccaggcactttacatcaaataacaaaaaagggcaagccacgaaggcttgtccttttaactcaaggcacatgctcaaagcatatgtggacgtttaaactgttcacatcagtgcgtccaacatcagcacttcccgtgcttgccacttaaggcggatgtcctctatctcataaatatacgcatctcgcgttcattaatcgactcgtcagtcagtaattgtactattttttatgtttgatgtacagtctagcacttttaaaatgacgatatttaaatttataaaaaacttcagtacacatagtcgataacatgaaacctaaagcaatagcaccagtaacaattgctactcgtagaagcaaattctctccttgactataatcccccacaactaaagcacgtactgcttgataagcaggcacgcccgggactaacggtactaaggcaggaatattaaagaccgtcactggactttttttaatgcgtgcaaaacacaagcccaaaatacctatcaaaaaggcgccaattaaatttgaaatcattcgcccaaatcccaaattaaagcaagtccaatatgccatccagcccactgtgccactgactcctgacaggtgaagatcgcgatgcggtacattaatagttaatgcaaaacccaccgaagctacataagaaaaaatgacattaataataatttctaaccaaagtggcatttttatactcctatgaatttaagtacaagtgcaactccaccgcctaaagctaaagcggttaacacagcctcgcacattcgcataatccctgataataaatctcccatgaatagatctcgcaaagcattagtaattgccaagcctgggactaaagtcatcagagcgccgatcaaaatattatcagtaatcatttgtggattaaaatgattgaataatactgccaagatccccatgaccattgctgcaattagctctgataaaaaacgaatcttagtatattttttaaactcataatacgaccaaaaaccaacagcccctactaaggcagcacctgggaaatcaacccagtcgtaattatccataaacaaaaccatcaaggtagcagacaatacagcagctcccaatacctggagccacattgggaaagtaggtgcttgtgatactaaagcaatcttttcttttaattcagaaagagtgatttttttaactgcaaattggcgcgacaagtcattaacccggtctactaattccaaattgatgttgcgatcacgaatttgtttcatctgacttagcttgccaccatctaagctcatgaaaacacaggttggcgtcgcaaaaacacgcggatcatcaattccggcattgcgagcaattctgagcattgtatcttctacccgatacatttcgctcccgccttcgatcattagtcggcccgcagttaaacaaatatccattacttcttgataaaattggacatcccgcttctcagacatagttttagcctcagttcatagtttcaatatcgatggtcttgtcgacccaatcaccgcggaaaaagtcacgttcgtgactaacaataatgactccgcctgggaagttaacaatcgcttttctcaaagcatccttggtatcgttatccaagtgattagtaggttcatcaaggaaaagcaaattagctggttcaaactgcatcttagctaattttactttttcctgttccccaccagaaagttcctttagtggactcattgcttgttgtgcagttaagcccatgcgtgccagcgcttgtcgcaattcctttggctttttgcgttcaaattcttcttgtaaatattggagtggagtcatgttgctattaggccaggttagatcttgcttgaagtaagccaactttgcagtaacagataactcatatgaaccataaattggctttaattgccctaacaatgtcttaagcaaggtagtcttaccaattccgttaaaaccagtaatcgccactttttcatccccaccaacagagaaattgaaggctgacttgaccaaagcatggtcgtaaccgatgaccaaatcttgcgtctgtagcaacaaattagaagcagtcgcaacatatggaaattcaaagcgtgccttgcggttgttttttggcggtgtcaaaacatccatccgcgccagctgcttttcccgtgacttagcactcttagcacgtgtacccgccttgttcttgcgaatataggcctcagtcttagcaatcttgcgttgctggttagcataagccttcaagtaggtctcacggttggctgctttttgccgcaaggcttgcttcaacgttcctgtataacgagtaattgtgccaaaatcgatatcgataatgcagttagtgattcggcccaaaaagtcataatcatgactaacgacaataaaggctccagcaaaattgttcaaatagtcaaccagccaatcaatatgtgaaacatcaagatagttagtcggttcgtctaaaaccagaacatctgggctttgcaacaacaactttgctaaaattattttagagcgctgaccaccagataacttagaaacatcgtgatcatagcctaaatcagctagtcctagtcctgaggcgacttgttcaatttcagtatcaatatcataaaaattattttcttctaaataagtctgtaccttgccggctttttctaacagggcttcgtccccgttttcggcatatttggcatacagatcattcaactctttttctttttgaaataattgatcaaaagccgtccgcaaaaagccacggatagtcacaccaggtgccaatttagcatactggtccaaataaccaacatcaattttattttgccaagttacttgaccatcatcgggcaaaatttcacccgttaaaatcttgattaacgttgacttgccaacaccattttgaccagtaacccccatatggtcttctttgttaagcacaaaattggcatcttcatataaagttttatcaataaaactctgacttaaatctttaacagttaataaactcatttttcatcccctattatttagctgattcatgttctttttcataattttggagtgcatcaagaacacgaggccaatagcgcttaggtaagatcagttgcaaacgatcatgataaataggaaaatcacttgcttttagccccgtaatcttagctagctcctgatctgtcagcttatatttataaacaatacgcttaatttcgactgatgcatgtcctctaaaataggataggccgaagaaaaagatagcaaaaacacttgctgtgatgattgctaattgcaaattcatcctgaagctgtgtagacaaataaaaatcacggcaataaaagaaatcacagctgagagtacaccgtaaataactggaaatattgattctttttcttccttttgcataatcttttcctccctaattgagacttagtaactttacgaacttagcagaaatcagccaaatttgcaagattctacgttttcactgatttttttacataagttaagtatacttagcataattaaaattgcacggagaaaaaaggaaaatgaaacaagaaaaacattattatttcacaccaattcatttgcaaattaatgacttagacgtgcaactagttttgccacaagtcgagcaagcagcagaattatatcaagctgttgcctgtgaccgtgaaaatttaggtaagtggctgccgtgggcctacaaaatgaaaagtgcacacgatgaagctaattttattaaacaaattcaagccaaaatgaaacggcagtcaatactcgttttaacaattttagtcaataagcagccaagtggcatgatcgacctgcataatttgattccaaataaaaaagccgagatcggctattggctgtcgagtaaatatcaagggcatggtattgtcacgaagagcgtaacggcgttatgccagcatgcttttagtgagtttaacctacactatattgatctgctagttgctgtcggcaatgacaaaagtgcaaatgtggctaagcgttgtggttttaaattgatgggaattgaaccacagctaattaatgggcctgacggacaaatttttcgtttgattcgagggtaaatatattgtgttcgcttgttatcaaagctaatattagataaaatatttaaacaagtgtttgagcataacactttactataaaaatgaactcaaatataataaaagtgtaaggtgatatgcatcaatgagtagtcggctcatggtcaatctgattctaatgcaggacataagggcctgacgggtagcagggaccaaaattaaacctgatattacatatctaagacgcaatggcttagttggtggcagacaccaaaattaaaccgactttaggagttcacaatttgtggactccttttttacttggaggaaaagagatgaactataaattatttaaatcagttaatttaaaagaattggggcaattacgtcggtacatatccattatttataatagtgctgatttttatgataaacattttgtaaataaaaccatcatttacactactaaaaataataaaattgaactcactgcaagaagagataactttatgcatttatgtggaatttcatatatcgaagggccaagaaaattttttaatgatgctctagatcgaaaagtacagctaaaaaagttcttattaaaaaagatggctctacttttcagaaattacaagttttaaatcaacttaaagaaatgttaggtccacacttaagattaacaggacgtggagcctttacatacctaaaattcgatcattctttacgtacaaataaaacgatcttggctcttgcattattaaataatcaaaattatatggttccaatctctttgctaaatttgaaattcatccatccatttcctaaaggagataagattattaaaatagaatctaaagatctaaatactggtaagattattactcttagatgattcgcagctaaaaccacccagtcaaatctttaataatgaaaaagataaccggcaccaataatgatggcaagaaattcagagtcttaacatcacgaatttttaataaagacaaaccggagcaagcaatcaaaaagccaccaacaatagacaattcagtaactaatggacctgtaaaaaaatcagccgacaaaaattttgctaccaagtaaatgctaccttgccagcaaaataaaaccggaacgaccgctagcatcccccaaccaaagctagcgccaaagaccatcgaagttactaaatccagcatggcattggtaaatagcatagtattgtttcccttaactgccgccatcacgggacccacgattgacaaagcaccaatacagcaaagcaaaatctcagtagctagacctttagctaaattagatttgcctgctttatcaactaagtgattaaaacgaccagcgatattgagcgcggtaccgactactccacctaaagccaagctaacaatgaacaaaactggatagtgacttttaggcatgctgttagtcacattctcccaaccgatgcctaacgctgccagtcccattgcgatgaacaaaacgtcttcataacgcttattcaatcctttctttaccaagcagccaactgtagtaccaaccagcaaagcgcaagtatttacaattgttccgatcatttttctcacctcttagttttattttaccgcagaaaaaaagtatccatctcggatactttttcatatttaccatttaaaatgccaactactactcgatgacgctgaagaactagatgaagatgtgctttcacccgtacctgaaccataaccagaattcgaaccacctgccggcttatcttgattttgatcataaatccgataattggtgaaagcattgggatcatcccacttgatgtgattgttctgatcattcaattcattttgccgcgtttcttcattgttcaaagtttgtgtttgcaaattcaggttcttacgaattttatctgacgtcttttgtagttccttagtagacgccacctgaattgaagaaccatcaatccaagcatcatgcccttgaatgtagccactctttaagctattcatgcagccacgataattgagcgccaaactaagcatatcattgaatgtcagattagttttcacatatttattgaaaatatctaccagcttgcggtaattgccaagcgtattaaccgacattgccttatgtgcaattgcctcaatcacctgacgttgccgcatctgacgaccatagtcaccacgtgggtcttcttttctcattcgaacataagccaccgcgtgccgtccatttaaatgctgcttgcctttgtggaaatcacaccagtcatacgagaagtcaaatggaacttggacatcgacaccaccaactgcgttaaccaggctttttagcgccttcatattaacttctagataataatcaattggcacatttaacattgatgacacagtcttcatacttgattcatgtccaccgatttcataagcagaatttacccgaaacatgaagtatttattttctggatcgcccttaatatctgccaaagtatcacgtggaattgaagtcattgtcgcagaattcttttgtggattagctgttgctaaaatcatagtatcggaattaccacgatcatggcgaccttcaatcccctggtcaacccctagaactaggatagaaattggctgtttattggcaattttagctgaagtagcagtgttgccgccgtttttaccatcaatcacactatggacggtaaaatacatgtgagcagcccatgccatgccaaaacaagcagttaataatactgccacaccaatcaagcgggcaaaaaagttacctgatttgagcgctgatgcatctgcggctaaagcacgattccgatgaagattaagcgatgaacgatgagcgcgataaccttctcttcgttttggattttggtccattcttttgatcgtttcccttcgaatttaatacaagttagtttatttgtatcacttttaatctctcgataaaataaaaatgctaataattaataataacttatttttttgcgaaatataacgcaacaagctaagatgtatagaaaatgaaatattatggaggtaaaaatggcaattccaactagaaacgaagtccctgaagagcttaaatgggacttaacccgtatttttaaaaatgacgatgaatgggagcaagcttatgcagctgcacaagaaaaagtggctaaacttgctgaattaaaaggtacactagctaaatcaggcaagaacctgtacgagagcttaaccaaaatcttagctgttaaacgtgatgtggaaaatatctacgtttacgctaccatgtccagcgatgttgatacttctaattcgcactatctcggctacgtcagccgggtacaaagtttggctaaccagtttgaggctgcaacaagttttattaatcctgaaatcttgagtatccctagtgataagcttgagcaatttaagcaagctgaacctagattaaaggattacgcacactatcttgaaacaattactaacaagcgtcctcatacattacctgctgagcaagaaaaattgatcgccgatgctggggatgctttaagtgtttctgaaaatacctttaacgttttgaccaactccgacatggaatacggttacgttcaagacgatgacggcaatatggaacaattatcagatggcctttattctttgctgatccaatcccaaaatcgtgatgtcagaaaaggtgcttttgatacactttatgccacttatggacagttccaaaattccttggcttcaactttgtctggcgttgtaaaaaagcacaactataacgcacgtgtgcacaagtataattcagctcgtgaagctgctttagccgataatggcgtacccgtagcagtttatgacactttaatccaggaagttgattcacacctagacttacttcaccgttatgttgcgctacgtaaaaagatcttaggcctgaaggatctgcaaatgtgggacatgtatgtgccactaaccggaagaccttctctttcatacaatttcgaagaagcaaaagagacagcaaaaaaggctttggctccacttggtgaagactacttgaagcatgttgactatatttttaataatcgtgtcatcgacccaatagaatctaaaaacaaggtaactggtgcctactccggtggtgcttatgataccgatccttatgagttgctcaactgggaagataacatcgattcactttatactttagtccacgaaactggtcactccgttcactcctggtacactcgcaatactcaaccttacgtttacggcgactatccaatctttgtggctgaaattgcttcaactactaatgaaaatattttgaccgaatatttcttagaccacattaccgatcctaagacgcgggcctttatcttaaattactaccttgattcatttaaaggcactttattccgtcaaactcaatttgccgtgtttgaacaattcttgcacgaagccgatgctaagggagaaccactgaccgctgacactttagacgacgtttacggtcaaattaatcagcattattacggcgatagcgttgaaccaggcggcgatattgcccttgaatggtcacgaattccacacttctactacaatttctatgtgtaccaatatgcgactggctttgcggctgcaacggcattagcaaacaaggtggttcatggaacgcctgctgagagggatgcctaccttggtttccttaaagctggttcaagtgattacccaactgagatcatgaagcgtgctggcgtagacatgactaagcctgactacttagaagatgccttcaagacttttgaaaaacggttgaacgaatttgaaagcttgattgagaaataaataatcgcgctcatataaaaataatcgatatcatttcgtgagatttgatatcgattttttgttgatgatcttgatttattacttggcatatttatcgctcaatatgtataatacgtatataagtattatagtgccagaaaaggtgaaaaatatggctgaaactttatataaaaaggtcgttaaaaatggttcttccttagctatcaatatcccagctaaggaagtaaaagagcaaaatctcaaagtaggcgatattgttgaagtaaaaatcaaaaaatcagaccgtcctaattctgaaaatttaaaagaaatagatggcttaatttctgattactgggatatgttagagtacttaaaggataagtagtcaatgaagatcaattatctaacagaaaaggatattttagtaatcaatgcaagggttattcaaagagaaggtgcaacgggacaaaaacctcacgttagggatgcagaagcccttcattttttagttgttcaacctaagcaaactagttttggacaagaattatatccgtcttttgctgaaaaagctgggattttattaattaaattagttaaaaagcatgtttttgaagatgcaaataaacggactacagcaattgcattcttactatttttacgacgcaattcttatgaactaacctgtgattggcaagatttagcaaatcaaatcttaaagatcgctcaaatagatgacaatgaactaaattaccaagaaatctatcaatgggttaatcaagtaattcatgaaaactaaaaataatcgatatcattttcgccctaatattatattttatatgaaataataaccactttataaaaaaataagggctattaacccttattcataataaatccatcaactatttcctatgtcatactactactcgattgtcctgcataaccagctagtgtagcctgcaagtcatgaataactttaggagcattaaaatttttagcaaattcgtactgttgcaattgataatataatctagaaccgatatataaagcagaatcattattttccgcttgatcaattgttctatccaaaattcttaccaaatttggattatcaattacatctttactaaaacgaactttttctagttcattttttaactttaaagtctcatccttcttaatcattatttacaccaaaggatgcgcaaatggtccatccttctgccatccagtatacataatacgaccaacgctatcccacatttgtgctaaattatcatgacaataatatcggttgcaatatacaccattaccatagtaatggtactttccgcctccgcgcttgtgatgtgtaccgcctaaaacttgacttaattgattttcttttagttcttgaaactttaccattccagacacctccgataaatctttaagcctgcctcacttagtacttctatcaacttacatatataagtctaccaaaacagtagtgttttctaagaaaacgtcagaaactggcaacgttcatatcatattctgttaaaatacataatttgatcaagaatttagtacctgtcgatttaccaatcaaatactccagttacaataccgttagcacccactgctgcatatctttctagtttcagctgaagttcaactatagctttaggtagttcattttcactaaagttttctttcaatttcaaagacaaattagaagcaatcgattgaattgactcatgcttatcagctttcgcaatagcagcttgtaataactcaaccaattcggcatttttcttaacttgaggatctgaaatcactgtattcaatctactcttaaatgcagcttcttctttaagattctttttaaagaacatatttatctccttgtattaaccttgatttttcagaaaatcatacaactcagtagctgtttttcctccacctacccatgcgttagcaatttcaccgtttttaattcgcataacagtgggagtacctggcacttccaagttatcaaaagcataatctgcattatctttactttcatcaatatttaaatagtataattgaccaccaatcagattattaaattcatttaaagtggctgaatattgtcgacaataatagcacgttgggcaaccaatatacaaatatctatcaatattatcttttttatcgaaaaaagaatctacttcatctgaattaagagactgtaaaatattttgtgtaaggatgaatgattccttaaatttatttctttaaacattagaaaaaggagttcctttctcgtatgattggtttgaacaaaaaaacacatacagaaagaagaactccttcatgaatgattttaccaaagattttgctcaagctctattcaatccagacaaaataaatgatttattgcgcaaagagctacaacaggctgttaataacttgttagaagctgaattgactgcctttctgggctatgatccctatgccagaaatggctggaatactggcaactctagaaatggtgcttatttccgcaaagttgatacgcaatttggcccaattgaagtgcaagtgcctcgggatcgcaacggtcaatttcatcagcacacgctgcctggctacaagcagcactcggatatcttggaaagcatgattatcaagctttactccaagggcgtgaccaccagggaaatagccgatctaattgaaaagatgtatggcagccattacagtccagcccaggtatcaaatatttccaagcagatgattccaaaggttgaggcttaccacaaacgcaagctaagcgacaagtttttctgcgtctatttggatgcgacataccttcctttgcgccgagaaacatttgagcgtgaagcagtctatattgccattggcatcaagcctaatgggcacaaggaggtcattgactactgcattgcacctagcgagaacattgaagtctggacagatatgcttcaaaacatgaaatcccgaggcttaaagcaagttgagctttttctttctgatggtgttgttggcatgaaaacagccttggccaggacttatcctaaagctcattttcaacgctgcttagttcatgtcatgcgcaatatctgcgctaaagtacgcgtcgacgatcgtgaaaagatcatgaacgaattcaaacaggtgcatcaacagacaaacaaagaagaagccacagctgtcctgcatgacttctataccaaatggggcaaggtttacagccatgttatcagaagcttgaaagacatagaaccagatctgctggtcttttataactatcccaagcagatcagagcttcaatttattcgactaacatgattgaatcatttaacaatgtgatcaagcgcaaagctaagcctaaggcagagtttccaactgaacagtcgcttgatgcttttattggcattcaggcaatgagctacaatgaccgttatttcaatcgaattcataaaggctttggtcaggttcaggacaccttagaatcctactttgattaaataaataattaaaaaatcaatttacgagaaagaactatttacacaaaagatttgacagtttcttaattggagacgctacaacttgccaatttatagctaaaatacctaaaattaataaaataaaaatatttgtatatttttattgctttttcatagttttatattcctacaaaaatctcagcagcaaaacaatggaatcacaattggtgccacaagttttactgttctaccaacatccttaccaaatttatagcaattatagcctcttttaccacctacacattctagtaagttttcatcttttaaactttcaaattttttcataattattcctcacctcgcatatttacatagtccttccttaaatccacgccaatacttaccttccgacttccaaaacttgttccatcctttactacctcctacaacacttaccaattcgtttgaacttaacttttcaaaaccaacagtattttccatttttatacctccgataaatttttaagtctacctcgcttagtacttctaagcgcatcatcaacttacatgtataattttaaccaaattaattcaatatccatgttatcgttatatattgttaacatatacatcacgcgtggtgctagttaaatcgttctagacaataagccaaattataagctaaaattgcaatttccaaccggctttgaaagcctatcagactacgtgctcgattgttctcggcattgtaataggtcagaagcgaaaagtcgctttcaattgttctgcgaatagccatcaattgatgatcattgtgctttttagctcctgtcatatttttacgatatggtgtccaaagttcgtaacccatttgttttagctgttgatgcagttctttgcctaaatagccttcgtcgccaagaagatagtaattagatggatgggtattttctatcagttcaactgtctccctggcatcatgaactgatgcctttgttacgacataatcaagaatgtaaccgtcatcgctaacaatggcatgaactttgaaaccatagaagtaaattttcttggtggccttataaccaatgttggcataaccgcgaaaaattttagcacgatagtttcgaattggttggcaaacaggtaccggaaagctgtcaatgatcaagaactgtccattcaggtcaacctttttattcatttcttgccgtatctgataaatcaattgcaatagctgacgtgaacgccgattaaaacgtgagtgtgataaacaattgaaacattcacagaatcttctttgtgattcaattcctgtcttagcttgccagataagtaaagccaaaatcagactgtccgtagttttaatttgatcaatatttcgccgatgagtaaactcagccggtgcatacaaacgataccagtgccgacaaattatcactaaatctttaaaactaacttgtaaatggtggctaaaacgcttaagcttaaggcagttcaatcagatcagactcttttctattattactatttacaagtcgagtctaacaagattggacttttttattaactaaaacgatttaactagcaccacgcgtatacatcatatttcactatgttacacaacttgataaagcatcattttactttgtatttccaaaacagtttaacaaaaaatcatcagtaatcgcgcttatacaaaaataatcgatatcattttgccaactatgatatcgattatttacatgctgtttgatattgaatttttttattttctagatcgaaccagttaagcccgcaaatttccacttatctggattctcatttaacatgatctttaacctaattagtgcctgtggtaatttaaaaccatgtactagtgaataattattcaaatcacggttcagttcaaatactaccttatcaaaattaacaccctgagttaacttgcttaaaccttgattgattaacttcgttgcatctcgatcatttacagtctcttgtcttaattcctcaagaatttttttaagattttgtccattatcttgcaattttaagtcgcttccttttaattaacctctactgccccatggtccatattgtaaccatccattggctacggtttgacccgctttaccccaaattgcaccgtaatctgggatagttttatgtgtcttagtattatacaacatatatggagttaatcgaataattttaccaccaacaactctatttagctcaatattgtttactaccttaaaattcttcatttccaatacctccgataaatctttaagcctgcctcgcttagtacttctaagcgcctcatcaacttacatatataactttaccagaatagcaggattttctatgacattgtcataaactgacaatattcacatcatattctgctaaagtacataatatgaacaaaactcatttagaatttagcaccctggatctaatataattaaagtagctagctcttcccgtaataattgacacttttccctgcatcccataccgcaaaaaatttctctctgacttggtagtttttaccatagtttccacttcaaacatacttatttttttctgttgaacagggtaagtacctatattagtaatttttccattaagtatttcagatgttccctgcttattttcaatattaaacttcatacgttgacccttatctagcacagccacttcagagctaggaacgtacgttattactcttaatttctttctatcccttatatcaggcatcgcaacactattcttattatctagatgaataataacattattttctaacataccttttttgccatcagctagagtgacactaattcctttagataatttttgcccttctttatattctttattctctaacgttactacccgatctggagtaataactcccatactattcatcacattttcatgcacagcaaaaaatgatccaataaatagtaaaatcacaaaaataaaagctggtaaaattatcattgtcgaaaagttacgaaaattatatgaatagaatttactactttctaaatcttgatcattcatttaatatcacctagcttttcaccaaatcataataatacccatgtttagccattaattcactgtgattaccttgttctacaatttgaccctgattcaataccacaatattgtcagttctttcagcaatagctaaacgatgcgcaataaatataacagttttattctttaacctaattaaattatcaaccacttttttctcagtaattgtatcaagcccacttgttgcttcatcaaaaatcaataccttagcaggtgaaagtaaggccctagcaattgttaatctttgcttctgaccacctgacaaaatcttagcattttcatctaattgtgtattaaatcctaatggcaatttttcaatgtcattctttatctccgcgatttggcaagcttcttctatctctttttcagttatattcttacgacttcccaacaaaagattctctttaatggtacctgcaaaaatatatggagtttgtggcacataattcacatatgagcataaaacatgcttatttatacttctagtcgaatgaccattaaaagttacttttccttttgtgggactgaaaaaatcaaccaacaatttaaccatagttgacttacctgatccactcattcccacaatagttaatttctcattatctttgatcgtcaaattaatatcttttaagacatcttcaccatatccataacgataatcgacatgtgagaaattaatgtctccatttaaatcatgactatcattaactgaagttttgcccttaaattcactttgaactaaataaacttcatttaaacgattctgagctacatttgcagcttgaagtgtaggttgcaagttaataatattttgtaatggatcaataaaatatgataataatgcattaaatgccatcaattcaccaatagacatctgattatgcattacaacacttgcccccacccaaagaataatgacattcagtgataatctaataaaagttttcaaagcagtttgaaaagcttctgttttgctatacttaaaagctttttttaaataatcaacaaactgactatcaatttttcgataacgtacttgttcactgtttaatgctttaatcgtctcaattccttgaatatcttcaataattgatgaactaactaccgcattactttccatctggtcattatttaatctttcaaacctttttgaaaagccgagaataacaatagcatagagtggtaatgaagctagcgtaatcaaaaacaatgtcatgttttgaaccgccaaaattatacccattaaaattacaattgaaagatcaaggaataatgaaatcaccgtacttgccaatgcatctataattctacttgcatcagaaaaacgagaagtaatctcaccagtttttctggtagtaaaaaattccatcggtaattcaaaaatatgcttaatgtattgtaaattaagatcgattgataaccgctgccccaaaacattcaataaaaattgctgaccatatgaaaaaattgagttaaagacatatgcaatcaataacccaatagctaaaacagataacgtggtaaatgtaccgttaggaatatatgtatcaatcaacccttgtacaaaatatgagctacagatactaatcagtgtcatcagcaaagcagctaaaataatgtttctaactaactttttctgtttaaacatataagggaataatgataatagattattctttttctcctttacaggcttaaaatctgccttaggcaccataaacaatgtaatacctgtccactctttttcaaacgcctttttggacatttttttaattccactagtaggatcaggatcggctacgattatttttcttttagtatttttaagaactacataataatgtaacaatcctccatcttttatcacatgaacaataaaaggatattgaatatctttcatattgaataaggacatatctgcttttaccgcttgaacatccatattgaatttttccgcagttttaactaatcctaaagcagtagttccttcagtattggttttagcaatatgacgtaaatgtgctattgatacttgagaatgataattctttaagatcattgctaaacaagctgcaccacagtctgtttcatcgatttgtggaacataaattgatttatacgttaacatgcccatcatttatctctttctgcttagctaatttctctgttttataattatatctagcaagaaaatctttcatcattttcacactactacgtgaaaaatcttcaacatccccattaacaaatgagacacgatgctgtttcaaatcaatcgactcaatgttcttcggattcaccaaacaagactggttaatcttctctaacataggattttctttagcatattgattaatactacctaaaagttgcatttcacctgtcgtcaagatcattaataacttgtgcggggttatagttgttgaaatataaataatatcatcaatattgacattcctagtttgacgtccaattttatacgaaaaagtcattttcttcatataattgaatttgtgtaagttgtagatagctacttctacagtctttaccatcatctgtctaaatttatccaaatcagatgtttttacaatgtagtcaattggacctaatcgtcttctgaatgtaattaatgataagtctgcatgactagttacaaagataatttgagctcgttcatctcgctttttaattaaggcagccagatcaaagccagtatcttcttccgtatcaccgcctaattcaacatcaagaaagtagataccaccatctaatttatgtttcttcagataatcaattgcacccatgtaatcagttgcagatgcaattgaaaattcaatttcttcatcatctgacaaaatcatttccgcagcaccaagaattttcttagtttgctcaatttgattttgatcatcatcacaaataaatactggatattgcattttttatttttcagtcccactttcactatcaggcaaaattgttaaatcaaaagtaaaccacccatcatcaacatagtaattaacaatcattgaatcttcatatttatgagtaatttcttttacattcgctagtcctaaacccatatgatgtttcttggttgtataattcttttgacttattttatctgtcgctactccactttttctaacgcgatttcgaatttcaaactcgaaatcgccgttttcttgataatacattgcatctattcgcgcactattagagttacctgtttctttgatcaaggcctgactttcttctgcagcattatcaaacgtgataccaattattctgaccagatctaaaatattaacactatcaggaattcgagaaatgtcgtgttcacaatcgaaactataatctagacctaaactgtagagttttgataacttagcaattgcaatactttttagattgttttcatggatatgatttacgcccttatacttacgcaatgcttttttattaaactgtgtttcagtgtagtgatcgagaattttaacaacctctttagagttaccttcttgagcgcttacttttaaaccatttaaaacattttgataatcatgcttaaagcgacgcaaatcatcttcgtttttgtcaagataacttgaatattcccgtagttgtttcatttcagaactcaattgctgctgcttaagaatcaattccttgttttctgcttcttttgctttcctgtcagcgtttgccaattccagctgcaattgttgttccttttgctctcgtttggttagaagatctttttgaattttaacagttgtcaaataagcaaatacagaaaaaattatttgaagtatcaataaacttaaagatacttcaaataataccgtcatatgtgtactctgtaatgctaaaaaatacacaatggaacttgataaataaacatataatattaatccaataaatattgaattatttcgatcatttaaaagctttcgaattttcgaaactgtcaaatcttttgtgtaaatagttctttctcgtaaattgattttttaattatttatttaatcaaagtaggattctaaggtgtcctgaacctgaccaaagcctttatgaattcgattgaaataacggtcattgtagctcattgcctgaatgccaataaaagcatcaagcgactgttcagttggaaattctgccttaggcttagctttgcgcttgatcacattgttaaatgattcaatcatgttagtcgaataaattgaagctctgatctgcttgggatagttataaaagaccagcagatctggttctatgtctttcaagcttctgataacatggctgtaaaccttgccccatttggtatagaagtcatgcaggacagctgtggcttcttctttgtttgtctgttgatgcacctgtttgaattcgttcatgatcttttcacgatcgtcgacgcgtactttagcgcagatattgcgcatgacatgaaccaaacagcgttgaaaatgagctttaggataagtcctggccaaggctgttttcatgccaacaacaccatcagaaagaaaaagctcaacttgctttaagcctcgggatttcatgttttgaagcatctctgtccagacttcaatgttctcgctaggtgcaatgcagtagtcaatgacctccttgtgcccattaggcttgatgccaatggcaatatagactgcttcacgctcaaatgtttctcggcgcaaaggaaggtatgtcgcatccaaatagacgcagaaaaacttgtcgcttagcttgcgtttgtggtaagcctcaacctttggaatcatctgcttggaaatatttgatacctgagctggactgtaatggctgccatacatcttttcaattagatcggctatttccctggtggtcacgcccttggagtaaagcttgataatcatgctttccaagatatccgagtgctgcttgtagtcaggcagcgtgtgctgatgaaattgaccgttgcgatcccgaggcacttgcacttcaattgggccaaattgcgtatcaactttgcggaaataagcaccatttctagagttgccagtattccagccatttctggcatagggatcatagcccagaaaggcggtcaattcagcttctaacaagttattaacagcctgttgtagctctttgcgcaataaatcatttattttgtctggattgaatagagcttgagcaaaatctttggtaaaatcattcatgaaggagttcttctttctgtatgtgtttttttgttcaaaccaatcatacgagaaaggaactcctttttctaatgtttaaagaaataaatttaaggaatcattcatccttacacaaactattttacagtctcgaatttttaaataatacttttggattatacttatagttgcgatatctagaattaaaaaagtccaaataacactaccaacattaataccaaaaaataatgatattatttcaacgccaatagtcgtaagcaaatctaccatttcaaaaaataatattgcaccaatatttgactttatccttttatctctttttataaaatatgagaataaaagaatacatatgacttgaaaaatatctactacgaagtcatttattttagcggtgaagctagttgtaaaacaagctaaaacaaagaaaatcgtaaacactaaatcttttttttggaatttccaattagataatttataaaaaatacgcgtggtgctagttaaatcgttttagttaataaaaaagtccaatcttgttagactcgacttgtaaatagtaataatagaaaagagtctgatctgattgaactgccttaagcttaagcgttttagccaccatttacaagttagttttaaagatttagtgataatttgtcggcactggtatcgtttgtatgcaccggctgagtttactcatcggcgaaatattgatcaaattaaaactacggacagtctgattttggctttacttatctggcaagctaagacaggaattgaatcacaaagaagattctgtgaatgtttcaattgtttatcacactcacgttttaatcgacgttcacgtcagctattgcaattgatttatcagatacggcaagaaatgaataaaaaggttgacctgaatggacagttcttgatcattgacagctttccggtacctgtttgccaaccaattcgcaactatcgtgctaaaatttttcgcggttatgccaacattggttataaggccaccaagaaaatttacttctatggtttcaaagttcatgtcattgttagcgatgacggttacattcttgattatgtcgtaacaaaagcatcagttcatgatgccagggagacagttgaactgatggaaaatacccatccatctaattactatcttcttggcgacgaaggctatttaggcaaagaactgcatcaacagctaaaacaaatgggttatgaactttggacaccatatcgtaaaaatatgacaggagctaaaaagcacaatgatcatcaattgatggctattcgcagaacaattgaaagcgacttttcgcttctgacctattacaatgccgagaacaatcgagcacgtagtctgataggctttcaaagccggttggaaattgcaattttagcttataatttggcttattgtctagaacgatttaactagcaccacgcgtataaaaaataaataaatctactattggtgaaattaatccctgtatcgctatcattactttaatccaagaaactttttccaattaaagtgaaacaatgggcgttttgacttattaacaatattattcattgcaaacaaattttgattaaaaaccatattagtaatagcaaatccacgaaactgtcaaatcttttgtgtaaatagatctttctcgtaaattgattttttaattatttatttaatcaaagtaggattctaaggtgtcctgaacctgaccaaagcctttatgaattcgattgaaataacggtcattgtagctcattgcctgaatgccaataaaagcatcaagcgactgttcagttggaaactctgccttaggcttagctttgcgcttgatcacattgttaaatgattcaatcatgttagtcgaataaattgaagctctgatctgcttgggatagttataaaagaccagcagatctggttctatgtctttcaagcttctgataacatggctgtaaaccttgccccatttggtatagaagtcatgcaggacagctgtggcttcttctttgtttgtctgttgatgcacctgtttgaattcgttcatgatcttttcacgatcgtcgacgcgtactttagcgcagatattgcgcatgacatgaaccaaacagcgttgaaaatgagctttaggataagtcctggccaaggctgttttcatgccaacaacaccatcagaaagaaaaagctcaacttgctttaagcctcgggatttcatgttttgaagcatatctgtccagacttcaatgttctcgctaggtgcaatgcagtagtcaatgacctccttgtgcccattaggcttgatgccaatggcaatatagactgcttcacgctcaaatgtttctcggcgcaaaggaaggtatgtcgcatccaaatagacgcagaaaaacttgtcgcttagcttgcgtttgtggtaagcctcaacctttggaatcatctgcttggaaatatttgatacctgagctggactgtaatggctgccatacatcttttcaattagatcggctatttccctggtggtcacgcccttggagtaaagcttgataatcatgctttccaagatatccgagtgctgcttgtagtcaggcagcgtgtgctgatgaaattgaccgttgcgatcccgaggcacttgcacttcaattgggccaaattgcgtatcaactttgcggaaataagcaccatttctagagttgccagtattccagccatttctggcatagggatcatagcccagaaaggcagtcaattcagcttctaacaagttattaacagcctgttgtagctctttgcgcaataaatcatttattttgtctggattgaatagagcttgagcaaaatctttggtaaaatcattcatgaaggagttcttctttctgtatgtgtttttttgttcaaaccaatcatacgagaaaggaactcctttttctaatgtttaaagaaataaatttaaggaatcattcatccttacacaaactattttacagtctcaaatccacctttaacctcaactagctcttcttcattcaactttttcattatttatgcttcctttcaatttaatgcactaacaatttttacactgttaatgttactacgagcgcaactttatgattaaaatcgtcatattctgtaccatttagatcatattctgcattttcaattaaaatgctcctccaccagaaccatttccccaactattcgacttcttcttgaaaaaatagcgtttagattttgatcgtccacccacaatttagacatgaactagatagcttccgcatattttctcttcccttcatttaccattttgttacaaataaaagcataactctatctagcttctcaaaattaagctcatcagattttgcattatcctaatcatattttgctaaaaataatcaatcctctttctcctctggccaaaaaagatcatctaatgtcttatccagcgcctggcaaatcctgatacacaagttaaccgacgggttataatttcccttctcaatcgcagaaatcgtctgtcttgaaacatcaatctgctgcgccaaatcttcttgcgttaaatctttaccgactcgcgcagccttcatttttaaatttttcaatccttatcactttccttatcacgatggagttgaaacaggcttactgctccaataatcaaccaataaatccccataatgttcagcgcactgttaaagtcatcaatatatcctagaatcaagcaaataccaagtaaaatatatagccaactatttgccttaacatgctcttcattaaatgcaaaatatgctccatggactatatcgtaaactgacatcaccgttaatgacaacataataattgcaaagttaacagcaataccatgctttgtataaaaatccgtctgcatgaataaagcagaaattacttctccaacgattaacacaagaaagctatacctgtcaccacgaccacgaatcaattcctgtcgttcatcatactttgccgcacgacgatttcccacgaatacaacgactaagatgaaagtcataactgcaaacaagcttgcaaaagccattaattttaatatttcaaattttgacattttacacatccctttcttttaatagtttgatattaagcccatattttcaaaatgtaaagtatgttttacatttttactaataaatttgtatttataaaaactagcattaacataatcggtatcatttcactagatttgataccgattatttgttaatgatacctatttttcaaaaatttccttgacttcttcttttaatcgtcgtattataatgacaattaaattaataaaagcttagaagagatgagtaattacttaagacttctgcagagagtcggagttggtgcaagccgatgtggttgagagtaatgaatatggtcttggagctagtttaaagagcaagctgttaagtaagcaatttacgagtgacgatcgttaccccgtccgagtattcccaattttgggagcacttagtaaggagttagttgtgaagctaacttgaatttgggtggtaacacgcttaggcgtccctagcatagaaattctatgctaagggcgctttttattttgcttatttaatttttcagaaaggagccagacaatggataaacctatcaaaactacaagttcacaaatcatcatcagtaaaaaggcattcaaccgaatgtgcactattgtctggttgatcttgatcatcatcggacttttcatcgttaaataaaacatcgaagcaaaactaaggagaaaaattatgacagaattacattacgatatcgttggtagctttttaagacctgcagaattaaaaaaggctcgcgcagaatttgaagaaggaaagattaagcaagaagaattaactcatgttgaaaatacagagatcagagaattagttcaaaaagagattgatcatggccttaaaatcgtaactgatggtgaattcagaagaagttattggcatcttgataccttctggggctttgggggtattaaacacactaagcaggcccacggctatttcttccatgatgaagaaactcgtaacgactctgcccaagttgagggaaaaattaaatttactggtaaacatccagatctttcatcatttgaatacttaaaaaaggttgtcgatgaaactggcgctaacgtaattccacggcaaagtattccagctcccgcacaattttacgcagaacttgttcgtggagaagaaaatattgccgcacttaaaaagatttatagttcagaagaagatttactcaccgatatttctaaagcataccgagacttaattttagccttatacgatgcaggatgtcgcgacattaaactcgatgactgtacttggggtatgattgtagataagcgctattggaaaagtcatttacaagatgacttttcactagacgaccttaaaagaaaatacttgaagcttaacaatgatgcaatcaaagatttgccaacagatttgcgaatatcaactcatatttgtcgcggtaactatcactcaacttgggcagcccaaggaggttatggtccagtagcggactatgtttttgctaaggaaaatgttgacgccttttatcttgaatttgacaatgatagatctggcagttttgacccaattgcacaaattcctaacgacaaacttgttgtcttaggtttagtaactagtaaaaaagcagaattagaagatccacaaaaattaatcgctagaattaaagaagctgctgaattccacccactaaatagtctcgctttaagcacacagtgtggcttcgcctcaactgaagaaggcaacacgttaaccgaagatgaccagtggcaaaagatcaagttggttgtcgacactgccaagcaagtttggagctaaatggcaattaactagttaaaataaagataaatagatttagacaaaggagaaaaaaatcatgggaaaagttgaaagttttgaattagatcatactaaagttaaggcaccttacgttcgtttaatcactgttgaaaaaggccaaaaaggtgaccagattagcaacttcgatttgcgtttagttcaacctaataagaacgccattcctactggctgcttgcacacgattgaacaccttttagccggtcttttacgtgaccgcatcgacggctacattgactgttcaccatttggctgtcggactggcttccatcttttagtttggggcaccccatcaactactgaagttgccaaggcacttaaggagtcattagaagaaatccgtgacaacattaaatgggaagacgtaccagggacaacgattgaatcttgtggtaattatcgcgaccactcattattctcagctaagcaatggtcaagagatattttggctgaaggcatttctgatgacccatttgaaagacatgtggttgaataaaatttaaaggtttaactgaaaaatagtaaataattaaaaaagctagcaattcattttagtgaactactagctcttattttttcacttatatcatcccggcaactaagccaactatatacaagaagacacagcagactaccaaatacaaaccgccccacttgaccgtttcttttaggatctcgccttcgtctccctcacgattaattgagccggttgctactgcaatattctgcggtgaaagcatccctgccgtggcccctgtcatgttcgaggctacaacccagtacttacttacgcctaagtccgttgctgcagtatactgcaaattaccaaataaaacattagctgatgtagcagatcctgttaaaaatgttcctagtgcaccaattaacggcgcaaacaatggataaactggtcctaaaaggccaaccaaggccactgctaatgcattcgtcataccagcataaaccattaccttagccaagcctacaatcgcacaaactgtaattgtagttttccatacgctttttatcgattgtcctaatatttgcatcatttttttcaagctgacaccctgaatcgccccaccaattaatgtagctacaaaaattaatgttccaggagaagataaccaactaattgacaatgtatttgggttctttcctgtataaacaacaagattagtggttactttattaagtacatcattgacagctggaactaatgaagaagcaaagatcacgaagataaagaccaaaataaatggtgaacatgccttgagcatttccttagcatttggacgtaaaacatctggctcttcttcatcatcatgccatctagttaataagactgtaatcgcaattgaacacaatgagccaacaattgcaggcaattctgcccctacaaattttgcagctattacctggggaatagccattcccagtcctgacatcaatgtaataaagcctacacctttaattgccttaatgctgccttcagtcaagataactaaaataaatggtaccagtattaccaaaatagataattgcaatgttacgatgaaggatagtttttcttgatgtagacccgtcacttcagctaaagttaaaactggtaatccaattgcaccaaaagccgtcgcagttgtattagcaatcaaactaatgactgacgcgcgaatcggatccaagccaaaggcaatcaatattcctgccgcaattgctaccgcagtcccaaagccagcgattgattctaaaaagccaccaaatccccaagcaataatcaaaacaataatccgcttatcggttgaaatcgtcgccagcatattttgaataatttccataccgccagattctgtagtaacgttatatgcaaataaagccatgacaataacaaacataatcggccaaatgcccatgataatgccttctagcgccccacttgccgtatctagcaccggtactttaaaactaaagactgctaacaccatcgtcaaaattaagccaatgacacaagcgcgtgcagctggcattcgcataactcccagcgaaataatcaaccaaacgatcggcaacaatgcgatcgcaaatctaatccacatcaaaatcctccatcatcaaaagtgttgtactatattatttaatcatgatttgggtaaaaagttaaaataagacacaaaattttagtttaaattacaattttcacaaatttcacttgcaagtttaaccaacaaactatataacaattaatggaaagtaaaatttctcacatcatgtttgaactactccgtggaatagagtagttctttttttgcgtaaaaaaatagccagaccgaattcagcctgacttctgttttttttagcgatgtttaattacgtgaataccataagcgattaagtaaattaccacttcgatcgttgcaataaagaaagttaccggccagttggtgataaagccgagatacagtccagcccacacgccaactaaagcgaaaaacacggaccaactgatcattgctggtattgttttaccaatatagcgcgccgttgaagatggcaatgttaatagaatgaagactagcaatgaaccaacaatctgggcaccgatagcaactgacatagccaaggctaccaagaaagcaataccaacccagccagtatgtacaccatgtgcaacggcaccgatatggtcaaatgagtcaaaattcaagcttcgagctaccaaaataattaatagtaaaactagaattgacaaaaccactagctgaatcacgccttgtttatcaacaccgatgatactaccaaacagaatattagtagcgtaacggctatttgatccagaaatggctaagaacagcacacctagcccaataaacagagctgagatcgcactaactgacgattctttttgatcgctgtgcaaggacaattctcctactccaattgaaccgagcaaggtaaatagtagcatcccccataacggtgcaatgccgataaagacggcaaaagctgctccagcaaagccgatttctgacagtgtgtgagctaaaaaagcataactccgtgctactacatatacaccgaccacgccacaggtaatcgcaatgaatgtactagctaagaaggcataacgcataaattcgtattgaaacattattcgaaatcctccttaaatttatccatctttccttgcctgatcgttcccttatttaaatatagataatcagtcatatactttttagctaaaggaatatcatgagtgacaaacaaaacggtaattttgtgttcacgattcaggtgcttgattaatcccatcaattcttccttagcagccggatctaggctagctgttgcttcatctaagatgatcatattgggatgatcaagtagagcctgcgctaaatatgcacgttgtttttgtccacctgatgcctcacccattcgggtattctgaatcttttctaaatgagtttcttctaactgatgatcaatctgttccttaacctttttggtcttaaacaatggggcgttaagtccaataaatgcacgaatcgacaatggatactccgcatcaatatttctaaactggggtacataacctaacttaacgtctgaatcaaacttaaagttgcccgcagtcggctttaacatccccattaaaatcttaattaaggtggtcttccctgttccattaggtccaagtagtgcagtcattgacccgtcttcaagctgaaaactcaaatcttgaaaaacatctttagtatcaaatctcatcgagagatcatttacttctaaaatcactcttctaccccctccctaagttgctattatttttctattttagccaaattttgataattttctttcatccaagccaagtaagtagtgtggttaggaatagtctcccgcacatttaacactggaatattattttccttagctaattttacaaataacttcacagttgaactgcttgcctgtgtattgttaacaaagaatgcaatcttttttgctttaatttcattattcatttgattaatcatcttaggactcggatcagtaccattctcaattgcttcttcaaagcccttatccccaatcttgtatcctgcttctcttaaagcataatcaaagacaggttcactaacaaagactggcttactatttttcttattagtcttcaccaattgcttaacttgattaatcttagctaaatacttgtcaccattagctttaaaataagctgcatgctttttatcaagcttagataaacgcttaactaggtaattaacatacttggttggcatacttagattgtaccaaatatgcggattatcccccttctttaatcccatcaagtcttcaccaactaagacaggctttttgctaacagaactagctagcttattcatccaagaatcatagcctaagccattagcaacaataatatttgccttggtcaattctttagcatctgccgtagttggttcaaaatcatgaggatcggtactgctattgctaatgattgccttagccgtaccatattttcctacaacatttttagcaatatctgcataaacattggtggtggtaataatcgagacttcacccgaattgctcgtcgaatttgatctattcgagcaagctgaaactaacagcgcaataacgccaattagtcccaaaaaagagattaacttcgtaattttagatttcgcattttgcataaaatatcctccttgtgcaaaataaaaaagcatttaagttagaaaattcagcataaattctaactaaaagttagaataatctagttaattacatatgtcaacatatttttgcatagacaaatagcaccagtctcccataagcctgatgctatcaataatttaagtcataaaattttgctgaattttattaaatgctttgttctaaaattacattattatataaacatatttttatataattgtcaaactaaattaaaattcttccttcacgtgctgacgcaaaacatctaagattttaatcacatgcttatcttctaagctataatagcgctcctgcctaacccgctcgctcttaactagcttagcctcttccaaaatacgcaagtgacgcgaaatagctggctgactaacatcaaactgcttaactaaattattaacactacttttttgattatcatttaaataatataagatttgaattcgaatcggatgattcaacgctctagtaatccgaataatttgctcgtccaatttcttcacccattcatactttttaatttattatagcttaaatttaggtataaaaaaacgctacccttcgggtagcgcaaaacataacagagtatcttgatttaagtagagatcatcaagatatttatattataatacgtttttgccaaaatgtattgttttttgattaataaccagaattatttaataataatattcgatattacttatagtattattcgtttgggtcttctttgacattcttcttccagaaactcatgattaaaccagcaacgattgaaccaataatagtagctaggaagtagaataagatgtggcttggaccaccgatgttaccagcaagtggtgatacccaaagaccaccgtgaggagctgggacaccaacgtgccataaaccaactaaagcaccaccaacagctgaaccaatgatacatgatggaattacacgacctgggtcagcagcagcaaatggaatagcaccttcagtaatgaatgagaagcctaatacccagttagaaacacccgcacgacgttcttctacagtgtacttgttcttgaagaatgtagtaccaattgcagtagcaaatggtggaaccataccacccaccattacagcagccatcaagatagcagcagtagctgagtgagggtcgttagcaaatgcacctgaagcgaagacataagcagccttgttgaaaggaccacccatatcgattgacatcattccggcaaggatagtggtcaaaagtaccaagttaccagtacccattccgttcaagaaatgagtaatagcaaagttaatgccactaaagattgggttaatgatgtagaacataattgctgcaataaagagcaatcctaaaattggatagaacagcattggcttcataccttcaacagaacgaggtaatttagcaaatactttcttcaaaacaaccatcaagtaaccagcaataaaaccagcagcaataccgcctaagaagccggctggtgaagttgcgtgagcttgaacgttaacttggaattgaccgttaacaatagaggccatgtaaccaccaacaaaacctggcattaaggctggcaaatcaccgattgattcagcgatataggctgccaaaactggaaccatgaaggcaaatgccaagttaccagcattgtttaaaaagatgaaagcaggagtcttagcgccacccatgtagttttctacgatgaatgagatggccattaagataccaccaccaataacgaatggaagcatgtgactaataccattcatcaagttcttgtagatacctgcccacaaacctggcttctcagttgatgaagattcagttgacttgtcttgagcacttgcacggtaaacatcagccttaccacccataatgtcatcaatcaattcgcctggcttgttaattccatcaacaacaggacggttaactaagtgcttgccgtcaaaacgtggcatatcaactttcttatcagaagcgataataacacctttagcacgcttgatttcatcaggagtcaacttatccttaaccccttctgaaccgttagtttcaattctaacttcgatgccgcgcttcttaccttccttaatcaaggcttcttgagccatgtaagtgtgggcaataccgttaatacatgcagtaacaccaacaatcaatggcttgttgtcgtcatcacttgtaccttgagccttagcagcttccttagccttcttagcttcagctgccttcttgtcttcttcgtcttttttagcttcagccttttcaaaaagatcgataacttcttcaggagtcttagtattcttcaaagcttcaactaaatcaggatcaattaacaaacctgaaagttttgctaatgcttgaaggtgagtattgtcagcaccatctggtgcagtaatcatgaagaataagtgaactggttgaccatcaagtgaattatagtcaattccttccttactcttggcgaataatacgcgtgccttgttaatagatttgttacgtgcgtgaggcatcgcaattccgccaccaataccagtagttgattcgttttcacgtgcccagattgacttaataaaagcatcttcgtcgttaacgatatcagttgctacttcaaggtcagccatttctttaatggcatcttctttgttcttagccttaagctccataatcatggagtcagggcttaaaatatccttgattctcatatttttcccctcgttttttattaagaaatttgctcaactttgatttgtggaagaacagcatcaatttggctcttaactgcaatgtccttagtaaaggcagtagcagcaccacaagccattccaattctgaagccttccttaggatcttgggtcttgtagtaagtaccaacgaagccggcaatcattgaatcacctgcaccaactgagttaacagcagtaccaacagcacccttagcatggtaaacatgatccttggtaagaaggaaaccaccttcaccagccatagaaaccatcacattttgagcacccttatctaaaagcttttgtgcgtattcaagcatcacatcacttgaatcaaaagttacgccaaacaagtctgctaattcatggtggttaggcttaattactagtggcttatatgccaaagtatcaagtaaagcttgtccagtagtatcaacaacaaattctgcacctgcttctttaatagtaggaagcaatgattgatagaaatcagttggaaggcttggagtaagagaaccgctcattactacaatgtcgcccttctttaaatcgtttaaacgatccttaaaagcagtgatttcttggtcggtaatgttaggaccagccgcgttaatttcagtttccttttcagcgtggatcttaacattcacacgagtgttatctgaaatagtaacgaaatcactttcaattctcttttgattcaattgacgaaccaattccttaccagtgaagccacctacgaagccccatgccgtattatcaacatttaattggttaaggatttgagaaacgttaattcccttaccccctgctaaaaatgaatcattgttagttctgttaacttctccgcggttaactttttctaattgaagaacatagtcaagcgctggattaacagttactgtataaatcatcctattttgcctcctctaattcaataccgactggtaatgaccgtttttgacctggttttagttgatcagttaccacaatcacgtcacttgtattggcaaacacagcaaagttacgctcaccgattttactattatcagttaatacataagcgtgtcttgcctgtttgatttcggctgccttaaccgcagcttcctctggatcaggtgtagttagattgccatttttttcaattccattagcaccaacgaagctagctgaaaaattcattgccttaatctgacttaaggcggtctgacctataacagcatgcgtatcgtccttaacttcaccgccaattagaattgtgttaattccgtgatttaaactgcataaagcagtctctacaccattagtaataatcttgacgttagcaacctctgctaaaaatggtaccatctcataagttgttgttcctgcatcaatgaagacattgtcacctggacgaacaaaattctgcacggcatatctagcaatagtgatttttgcgtcatgattcaaactgaagcgaacgttttgtgatacatcacgagaaaaatgtttaactgattgggcaccgccatgaacacgcttaaggatcccatttttttccatctgaattagatctcgacggatagttgattcagatgttgcggttaagtcacataattcacttacgcgacataactcgtgttgattaacatagtcttcgattaagctttggcgctcctgagtcagcatcatttctcacctcgataaatattgtattcgctttctcctccaaaatcaatcatttttcttcaaaaaatgtcatttttatttattatcgttcaataacattcatttatatgcaaaaaagatgccgttttttgattgaaacgacatcttttcttcgtcatttggaattattcttagtcgttttaccctatttgactaagaatccgtaaagatgactaagaaagagaaccaaagatctattaaccttgcaaaagcaaaacacgctgaatcattattgattcagcgcgttttactattaaatatattttgtctagcctctcaagctacgcttaaagttttgccatgggccgacatcatctgtttgcaaaatcaagtttggatagatttttctaatccagataaatgacgctactgtagcggctaaagcaattaaagcagagatagctgcctctaaattagttgcgttacccataattactctagctggcattacaaatgatgatagaaacgggatgtacgataatactttagcaaaaatcgtatccccacctgattgcatattgactgtgaacaagaacccgatcaacatcaatgtagatagtggtcccaccgctttgttggcattctcgcttttagcaaccaaagcgccacagaaagctgcaaagataataaacaataccaagccgattatcgtaaacaccaatccccaagaagccagattgccaattgcttgatcaatcatcggcttatactgtctaaataaatcgctaaagccatcgatgtatggggccgcgcaataaactgccacaaaaccaacaacataaattaacacttgggtgataatttcaccaaaaatacctaaaatcttcccagtgaaataatcgccacctggcatactcgaaaagattacttccattatcttggtacccttctccgtagcgatatcttgtgctgttacttgcgtataagtgatcacaagcatgtacaagataatcagcaaaacccagaaggaaatttgcttaacaggatcattatcaaagctcttcttatcaacatgcttaacttgttgcttaaattgcgctcgcgtagctaaagactgagtctgttttgtcgttagcttggccttacttaaattcaattgttgctgggcggtgtttaggctagttagcagctctgattttagatcactgtccattttttcatcactatagtaagttgcagctaattgattattcttttgttcaattaaaacatagccatcgatatcttcatctttatacgcctttttagccttagcttcagtgctatagttgtcaaagtcttctgactttttaattgcttgctttaaggcagaattagaagtaactaccccgacatagttgtcatcactgccgccagctgataccattccgataacaaatgaaaagaagacgagcagaaacggtgctaaaatcatcagcaaatatgaccaagttttcacttctctacggtaggtttcttttgcgacaagccagatcttattcatgacgcgcacctgctttcattttgaaaatctcgtctaaagttggaggttcctggtcaaaagtctggatatattgaccggccgaaagttggttaaaaatatccttaccatatttttcgtctgcaagaataagcagcttcattccattgttttgcaaaattatatcttttacacctggtaaggctgataattcagtagcacttttgtctgtcctgacaaaaattcgagttaggccaaagctgttcttaatttcatttactgggccattcaagacgatatgcccatcattgatcattacgacgtcatcgcacaattcttccacgttacgcatatcatgatcagaaaaaatgatcgtagcgccttttcttttttcttccaaaatcagctgcttcattagatcaacattaacaggatctagtccactgaatggttcatctaaaataatcaatttaggttgatgaattaaagttgcaatcatctgtactttttgttggttacctttagacaaagacttaatcttatccatggggatccctttaacagccaaacgtgataaccaatcaggcaattcttcttttacctttttagccggcatccctttaaggctagccaaaaacactacctgatctgaaatagttaacttaggcatcaaacttcgctcttcaggcagatagccaatattgtcataatctttagcgttgaaagaatgtccatcaatactaatctggccgtcataatcaacgaatttcaaaatactatgaaagatcgtcgacttacccgacccatttttaccaaccagtccaagaatacgcccatctgacacactgaagctaacatcaaacaaaacctgtgttgacccgaagcttttatttaggtgttctatttttaacataatttttcctcaactttttatctaatggttattagacctagaagtacaccgtcaaagaactgccataaagtatcggttgaaaaaattgtttttacaatatcaactgacccccaattggttactaaagtaatcactacaccagctgaagcaaccactactcctgtaccaataacttgaggggcaagtttcaacactttcttctgccatggaatctttgatgcgaccgttttattaaggactaagcttgcggacatgatgccaccaaacattagaccgaaagccaatccggctccaatcgacataataatttgaaaaggttgaggcgaaccagcagtcttaacatacatcatcacaagagctaatattggtccaacaagtgctccaattcccatgccttcaataattcgtttgttttcacgagcaaatttttcattattcattgttcttacctcaaggaaattttcagctaattaaacaaatccgaaaacttagtcggaatgttgttcttggcgaagtatttcttgaatgcatccccaaaactcaattgatctttttctctattttcaagcaaatcatgaacagctaagaatgctgtaacggcgtaattaacggctaaaatgattaacaaaccgagcacaatataaattaagtacagcattgttctttcctccaattcagcgattatctcccaggaaataatcttttatccttttaaattaatcatatccccatcatttatgtaaaaggtaaaaccgtccaattctgtcatttttcggactgattttgcattttattcttcatcttttttataaactaataaatcccctggttgacaatccaagacttcacagatcttgctcaacgtgtcgaagcgaacgccatgcgcctttcctgtcttcagaatcgacaggttagccggcgttataccaactttctctgccaactcctttgaagacatctttcgcttcaagagcataaaatctagtgtcacttcaatcatctatatcaacctttctaaataatcgagtctgcatcctcctgaaccttcattccgtacttgaataccaagtagactacgtatagtactgctaggaaaagcaaaccagttgtcacaccacttgggtatagtacattattcgaggatttagcgaaccaagtgcggtgagttatgaaaataatgtaatctattattgaaataagggtatatccagcaactgaaattaataatttcttgagtaaattcaaattactatcagcaaagtaaacttcttgcttgatattcttaacaattaatctggcatatcgacagattaaaaaggctgcaacgctcatcatgatcagtgatagcaacacaaccactattgcaccgatatagttatcaactgatacgccttttatacccctaccactttcaaagccagcacgaaaatccggattatgtataccaaataacacaacacctcccataacgatccacataattattcctatcacacaaaatatttggtaaatccaagcaaaaatcgtaagcaaattcaaaattaattttttcatttttctatcctctcaaaatatggatgattctgtatatagcactgccaattacacccgttactccaattactaataatgtaattctaagaacactccatgttccgcctaagttagcaaacactaagattgccatcattatcagcattccaataattgaacctatctgtcttttcttttctggaagcatatctatccctctcttccataaaactatctatctctttctcgtcttttataattattgtattacgataatttataattgcaatacagaaataaaatatttttttgagataataaaaaaataccaaattagtcgttaaactaacttggtattatgttttatcttccaagctactgctttttacttttcttcttatagtaagagttcatgaaaatattcataaagataacaaaggctacactttcaactatattccaaaatactgttccaaagcttaatgttttgtactgaaaatagtcccataccaatcctattaacagggccaaaataccagcgatgatacttctgtttctaacttggcgctcggttaaaattttatttttcataatttttaccccattattatcatatcgaaaaataggaaatctattaaccgaattttctattttttaatattatctatgtttatgttttttatgtctattttgtttggcgaaatctttaacagcgccttctacacatccttttatcataccacttccgctagggagcgcatcaatgaaacccgataaacatgatccacctacaccaagccagttagtgccaccacttactttttctaattctttataattcatttctttcatcataaaagttacctccttttttacaaatgtgatacacaagaaactgatccgctaataatacccacattagcaccaaatatagctccacctactgtaccaattggagtaccaaatgcagtgcctgcaatgccatattttagtccatccttcaacgctcccattccaatagctttagcacaatttgtgatttttctacggcgtcttgctttaccaccgttaccaccgaaaacagctgacagttcttcataagttaaagtttcaaatttgttcatgtttttcccctttataaaacttctaattacaattttcataagtgaattaagttttacctctcttcaacttacacactaataatacaaaacaatttaccttcattggcgtataataccgatttagcacgaaacaagatctatttggaaaatatttaccaaatcggccaagttttcgtatattagtaatttacaaaggattcttattaattgttacgctaacttgatattctgttttataaatccgaaaactagtaaaaacatagacacaatgcacttattatgagaatggctaacaaaaaaatcttctcatagccaagactacaagaagattgccatcacattaatgcataaactgatacgcacgctctttactttaataaaacatgatcaattatacgactataacatagccactcaaaaccaaaaacttgagtcgaaatcaaataatcatttttagcatagtaacctacgaaaaaaatcacaagtttcataggtttctttgcgttatcttctaagtattacgatattttctattggagatatttttagcctattcgcaccagtatttttttcaatacttatctactagttattatctacctctatgaaaagaactttggaaaaacttaggattttccaaataaacgtctcgtttatgattaccacctttcttactgtataaaggtagcatgtgttcagtatcagttagaccaatatcatctacagaacctgacccacctaaaattccgcttaaaagtacttcatctttagaaataatgattcgtttcatctacttttcctccttagttttctttcctaatgaaatgcccaaaactaaactgattaagatactaatcattccaattaattgaccccagatattatccttctcacctgtagatggtaaagactgagtagaaccatttttaatagtgtcattttccaatcgctttaacttagtaattctattttgattgttcttaacggcactataaggcttgctttgcacttttactgaatcaaattgtttattttctttcacacttccgtgtttttcactaactgctgctagaataatattctttttatgcgatttagctgttttcttgaccttagtggctacgattttaggttttactggcttcttcacagttttcttcttagtttcagctctaggagccgcatactcttgattacctgtcgtaactttagtcagatctgcagtagagctagcaacatttgcagcattctcaaatacgctattttcaacaaagtcagtaatagcaacgtcattgctagactgtgtttgatcatcttcagctacagtcacttcaggtatttcattactttcagattcagtagtattatcatccttcggttgatccttaattactgcctgttccactaatttattagctgcatcagaatacaaaaagttatataactcttgtcccgtcttttctccaccgacccatgcactaataatttttccattaataaatctcattgtagttggagtacctggaataccaatttctttgaaggcatactcatgtgctccttcttcagcatcaatattgaaataaagcagcttacctttaacgatttcattgaaatcttttaaatcaggtgaaaattgtcgacagtagtaacatgttggacgaccgatatacataagatgttcttgattatttttctctgctagaagatcttttacttcttgcatttttactctatgaaaatcttttacattgttctcataatcttcaacagatacctcatcttcatcatcttcactatcttcctcatttgcattattaggatcttgattattagtattctgtgactgattattttgatcttcagaagctgctggctcttcttcctgcttattttgagtttgagctgcttcgttcttactactagttttctgctcagattcggaaacatttttatcatcattttctgttttagatactacttcacttttattctcttgagaagtattaccttcatccgcatgcacaatagtactattcatcatcaataatactgctgggctcaacattaacattaatatttttttcttattcatagatcttcctccgtattttttataactaagaaaaatatatcaattatcagctatctttttggttatcagacttattcagtacactttttgaccaaatcagttatcaaaataattggaatttgattctaactaaaaaagagcttttcagctccttttaattttggttaagaattttatccttaaaatattcaaaatatgtactcttacctgtaataatagttgcgttgccttccatcccatatttcaaatttttcttggacttggccttacagattacttcatagacattatttccgcgtagattaatgggatatactccaatttctttcacttttcctactaatctatccattgttccactagcattagctacctgaaaatacagtgtttggcctttttttattgccccaattttattacctgggaaataagtaactacattgaccgttcttttagccttaatcatcggaaacaagtgaactgtattctcctgtttatcatcaagatgaactagccatttttctctatttcttctaacaatttgtccttcatgatagtttctattggcaatattaagtgtattttgtggttctacaattccggtagatgtaactgtactttgtctagttgcaaagaaagaaccgactattaagatcagaactaaaattgccataggaataataatcatagttgaaaaattcttgaatttataggaatagtattcggtactctcatagtctttattattcataacgttgctcctaattctcaactaagttatagtaaaagccatgtttctgcattaatttctcatgacttccttgctcaacaatttgaccatgatctacaaccacaatattgttagtcctttgtgcaattgctaaacgatgagcaataaaaataatcgttttatcttttaatttcattaaattatctactacttttttctctgtaatcgtatcaagcccgctagtggcttcatcaaaaattaaaattttagccggtgacaataatgcacgtgcaatagttagcctttgcttttgcccaccggataaaatcttggcattttcatccatcttggtttcaaactgcagtggtaattgttcgatttcagactcaatttctgctatctgacaggctttcaatatatctttttctgtaatatctggtcgactacctaagagcagattttctttgattgttcctgagaagatgtatggtgtttggggaacatagtttacgtatgaccgtaagacatgcttatctactttagtagaattaaatccattaaaagttaacttgcctttgcttggagagaagaaatcaactaaaagtttgaccatagtagacttacctgagccactcatccctacgattgccaacttatcattgggttcgatttttaaattaatatctttcccggatttaaaattgaagtgcaacactaagtgttaaacaaaaaggccatgaagacctaaacttgaagtgacgaaaaatcaagaaaggaagatcttcatgaccaattcaaattctagcatttctaagcactatcatcaattaaccagcgtacaacgtggacaaattcaagcaatgctggattccggcataacttcccgtactgttatcgctcaagaagttggctgccataagtcgacaatcagtcgcgaaatcaaacgcggaagcgtcctgcaaagagacagcagctatttattgtatgagcactattacgctgatactgcacagatttattatgagaagcgtcgcaaaaactgctatcagcgcaatccattgaagcattatgctgtctttttgagaatgctctccagacgctttaaagctaaatttgatgccaccagcatcgatgagttcgttggtgaattcaaaaggactatgccaggctacccttgtcccagcacaccaaccgtctatcgctatattgatcagggcttgctggacataagcaatattgatctgcctatgaagctcaaaagacgcaggaacaagcgtcatcacagccatggcggtcacgctttgcacaagaagcatcttggcaattccattgaacagcgtcctaaagagattgaagacagaaaagctccgctgcactgggaaggagatctggttaaaggcgtcagacgcaagaatcagcctgctttaatgactttgactgaaagaaccacacgctttgaagtagttatcaagattcctgactatcgggcaagcacatgccaaaggctgcttcaaaaggagattgacagacatcctgcctggtttaaatcaatcacgtttgacaatggctctgagtttgcggatatgaccaagatcaagggctgccagatttactttgctcacccatattctccatgggaaaggggcaccaatgagaactgcaatggtcttttgcgtcaattcttccctaagggcaagagcatgaaagacaagtcaaaagcttatgttcaacaggcaactgatgccattaaccacaaatatcgccgaatcctccaatatcacacagcagaggaactcttcaagcaatatatctcttcataacctaactgttgcacttaatttgacaattcaggaattaatatcttttaatacatcgactccatagccataatgatagtcaacatgatgatattcaatctcacctgctaattgcttggcatccctaatctgagcatctttctggaactcactcttaaccatgtatacttcattcaatcgattttgtgctacattagctgattgtagagttggttgaagattaataatgctctgaagtggatctacaaaatacgatagtaatgcgttgaaggtcattaattgaccaatgctcatctgcccgttcattacaaccttagcccctacccagaggataattacattgagagataactgaatgaaggtctttaaagctgactgcaaagattcagttttactgtaacgaaaagatttcttgaggtaatcgacgaattgactatcaatcttacgataacgtgtttgttcgctatttaaagctttgattgtttcaattccttgaatatcttcaattactgaagaacttaagacagcattactctccatctgatcattattcatcttttcaaatttcttagaaaagctaagaatcaccactgcataaattggcaaagacagtagagtaatcacaaatagagtggaattttgaattgccaaaactattcccatcacaattacaattgaaagatcaagaaataatgaaataactgtactggcgagtgcgtcaataattcgactagcatcagagaaccttgaggtaatttcccctgttctacgagttacgaagaattccattggtaattcaaaaatatggcgaatgtattgtaagttaagatcaatacttaatcgctgacctagaacatccaatagaaaattttgcccgtaagaaaagatagagttgaaaacatatgctatcaataaaccaatagctaggatcgacaaagtttggtatgtaccgctaggaatataagtatcaattaagccttgcaagaagtatgagctacaaatactaatgattgtcatcaaaagagcagccaaaataatattagtgactagtttcttttgtttgaacatgtatggaaatagtgaccacagattttgctttttctctttgagtggctcaaaatcatcatttgggaccataaaaagggcaattcccgtccattcttgagaaaacttttctttagacattttcgttaaaccaacgctaggatccggatcagcaatcactaaataatttttggttgccttaatcacaacataatagtggagtaattcgccttgctttaagacgtgtacgatgaaaggatattgaatgtctgcatcaggatcaaacaaggacatgtcagctttaactgcttcagtttttagattaaatgcttgtgctgttttaactaagcccagagcggtagtcccttctaaattagtgcgggctgaatgacgtaaatgggctaaaaatactctagaatgatattttttaagaatcatagctaagcatgcaactccacaatctgattcgtctacttgtggtacataaattgatttatactgtagtaacatcttttccactcctcatattaagttgaatccattatttcatgattggaaaactaaatgtaaaaaaataccaaatcggttattctcattaccgattcggtattttagttttctaactagattgagctactcaactttaatattttcaaatttatctacaagctttttaaccacggctttatacgatctagaataagttaccatctgaccattatcaaatataataatgcgttccttcgtgtcaattgcactaatgttcttaggatttaccaaagaagattgcgaaacttttgccaagaatgggttttctttatcaatctgagtaatatttgccttatactcaacttctccattctcagtaaccatatgtactttatgctgtgtagtactgtgttcaatgaaaagtatatcgccttcggccactttacatacgcgccgaccaatcttataagtaaagtcacgttgactaaacttaattctgttagataaattatcgaaggcgttacgtaacgtttcttcgatacgttgaataatcttatcagacgacatagacttactaatataatcaattgcaccgatacgacggcgatacgttaatggagcgtacttatcgtacgccgttacgaagatgatctgggcattttcgtcattcttcttgatgaattcagctaaatctacgccattcttagctttagactctcgacttaattcaatatctaagaagtagataccattcttaatatcatttgtgactatgtatcctaccgcttgagcaaaatcgttagcaacaaacgtaacagattcatttaattcagcgtaaccttcattatcatctattaagtcttgaatagatgcattgatattcttagcaatctgattagctaaatctttatcgtcatcgcatacaatgattgggaacttactcatcctcttcaccatcttccgtatcaattgtcatataaaagtcgaaccagccgtcttgaattgtataagaaatagacatatcaggatatttactctcaatttccttaatattagctaatccaagccctttatggtctttcttagtagtaaagccacgttgttgaatttgactagttgagatatttttattttggattttatttctgatttcgaactcaaattcatctgggtcatcagaatagaccattatttggacttcagcacttcgaatatcatgcttttcggcaatcaatgctttactttcctcaattgcattatcgaaagtaatgccaataatacgtactagatcgagttcatctacatggtctggtaaattacggatattatttcgacattcaaaattatatggtatatccaaattatacaattctgttatctttggaataataatgctcttaattgatttaacgtaaatgtgatttaggtctttatatttaagtaaggctttagaatttaggttagtttcagtatatttatctagtttctgaattacttcttgaacgttaccttcttgcgcacttacctttaaagaattaagaatatttttgtaatcatgtctgaaggcgcgaagatcatcttcacttttttcaagataagaagcatattcttcaagctgatgctgctgttgctttaatttttcttgatcctttttatttaaaagtttttcttgtaccatcgtcatttcatgatatataaatatagcaaaaatagtttggataagaatatagagagaaaagaacaaagttaatggtgtaaaagatttgctttgaatatatatgatagagatgctcaccgtagaaacataggtataagctaatatgcctacgaaaattttattattttggtttgctagataattatatatttttccattacctagttttattgcaactatcatcattagtattagtaagaaacgtagtgataattggcctatcaaagtaaatgacataacctgagtgatcatatcagacacaatatcaactaataaatctaatgtgcatactaatattattgaaccaaatagtatttctaatgtattattttttctcaaatataatacaaaaagcaaagtttcgaaactgtcaaatcttttgtgtaaatagttctttctcgtaaattgattttttaattatttatttaatcaaagtaggattctaaggtgtcctgaacctgaccaaagcctttatgaattcgattgaaataacggtcattgtagctcattgcctgaataccaataaaagcatcaagcgactgttcagttggaaactctgccttaggcttagctttgcgcttgatcacattgttaaatgattcaatcatgttagtcgaataaattgaagctctgatctgcttgggatagttataaaagaccagcagatctggttctatgtctttcaagcttctgataacatggctgtaaaccttgccccatttggtatagaagtcatgcaggacagctgtggcttcttctttgtttgtctgttgatgcacctgtttgaattcgttcatgatcttttcacgatcgtcgacgcgtactttagcgcagatattgcgcatgacatgaaccaaacagcgttgaaaatgagctttaggataagtcctggccaaggctgttttcatgccaacaacaccatcagaaagaaagagttcaacttgcttcaagcctctggacttcatgttttgaagcatctctgtccagacttcaatgttctcactaggagcaatgcagtagtcaatgacttccttatgtccattaggtttaatgccaatggcaatatagactgcttcacgctcaaacgtttctcggcgcaaaggaaggtatgtcgcatccaaatagacgcagaaaaacttgtcgcttagcttgcgtttgtggtaagcctcaacctttggaatcatctgcttggaaatatttgatacctgagctggactgtaatggctgccatacatcttttcaattagatcggctatttccctggtggtcacgcccttggagtaaagcttgataatcatgctttccaagatatccgagtgctgcttgtagtcaggcagcgtgtgctgatgaaattgaccgttgcgatcccgaggcacttgcacttcaattgggccaaattgcgtatcaactttgcggaaataagcaccatttctagagttgccagtattccagccatttctggcatagggatcatagcccagaaaggcagtcaattcagcttctagcaagttattaacagcctgttgtagttctttgcgcaataaatcatttattttgtctggattgaatagagcttgagcaaaatctttggtaaaatcattcatgaaggagttcttctttctgtatgtgttttttttgttcaaaccaatcatacgagaaaggaactcctttttctaatgtttaaagaaataaatttaaggaatcattcatccttacacaaactattttacagtctcaaagtttcaagtatatttgtgaagattacgccaatattacctatagacaataacaaccctaaaaaaatattagcaatacacaaaaatagaatctgtctctttttagatcttactcttgatatttaaaaaaaacaccatacatctgctaaactagaaaaaacattaagaaaaagaaataagactatcttttccatatattattccaaagttttttactcaagaaattaaaaccaacatgtgccgtgcttccaccaacaaccttagtcaattcttcttccttcaaaacagtctttttaacattttgcttcttcatgatatttcatcctttcatgattttatactcaacttgtttacacctttaatatatcatgtacttttaagtaaacccggatttaaaattgaagtgcaacactaagtgttaaacaaaaaggccatgaagacctaaacttgaagtgacgaaaaatcaagaaaggaagatcttcatgaccaattcaaattctagcatttctaagcactatcatcaattaaccagcgtacaacgtggacaaattcaagcaatgctggattccggcataacttcccgtactgttatcgctcaagaagttggctgccataagtcgacaatcagtcgcgaaatcaaacgcggaagcgtcctgcaaagagacagcagctatttattgtatgagcactattacgctgatactgcacagatttattatgagaagcgtcgcaaaaactgctatcagcgcaatccattgaagcattatgctgtctttttgagaatgctctccagacgctttaaagctaaatttgatgccaccagcatcgatgagttcgttggtgaattccaaaggactatgccaggctacccttgtcccagcacaccaaccgtctatcgctatattgatcagggcttgctggacataagcaatattgatctgcctatgaagctcaaaagacgcaggaacaagcgtcatcacagccatggcggtcacgctttgcacaagaagcatcttggcaattccattgaacagcgtcctaaggaggttgaagacagaaaagctccgctgcactgggaaggagatctggttaaaggcgtcagacgcaagaatcagcctgctttaatgactttgactgaaagaaccacacgctttgaagtagttatcaagattcctgactatcgggcaagcacatgccaaaggctgcttcaaaaggagattgacagacatcctgcctggtttaaatcaatcacgtttgacaatggctctgagtttgcggatatgaccaagatcaagggctgccagatttactttgctcacccatattctccatgggaaaggggcaccaatgagaactgcaatggtcttttgcgtcaattcttccctaagggcaagagcatgaaagacaagtcaaaagcttatgttcaacaggcaactgatgccattaaccacaaatatcgccgaatcctccaatatcacacagcagaggaactcttcaagcaatatatctcttcataacctaactgttgcacttaatttgacaattcaggacttttaagtaaattaaaaaagataccaattcagtcatactttcgtaccgatccggtttcatatttcttcaaacgtaaacaactgacaattaattttcttagctaattcctgacagctatccgtaaagccagatttggaaaatagataataatgcttaagtggatacttgaagatttcactatttgtaatcaatttttctaacacactacgagagatcggttcattcttccatttacattcgccgaaatatccatcacgttcatcgtcagagaatcctacaatatctaactcaacttgttgatgtgttctcttatcggttccccaccaattgcccaagtggataaacggattaggaacaattttttcattcatatcctgagaccacatgaagtcttgactgtatttttcaaactcaggtcccatgaaatcagatagacccttttgtacttttacccaagcaagatcagttaagccacgctcaattagatcggtttgcttgccaacaaaggtataccagaagcggaacatcccgtcacagatacgataaacgatatttttgcttttactcttcttttgctcagtaaccggtaactttttctcaacaatacctaaatctatcaaattattcaggtacgtggttagcggaccagtttgtaagtgggcggattgcgcaattttactatgcttagaagcacctgaagctatcgcattgataatcgaattatagttagttggatcgcgtaattcctgttgtaacaagttattaggctcatcaaataagcgacctgatttactcaaaaagtttttcttaatattatccgcaactgacatgctgtctgacatataactcaaatattggggtacaccgccacaaaccgtattgatgataaaagcgtcctctttactgagttttggtaacatttcatgtgcttctgataatttaaatggttcaagctttaaggctaaagtgcgacgaccatatagtggactttggtagcctaagacttgtcgttccataaatgacatcgatgaaccacataaaatcaaaaataggttagtttctttgaattcatgatcaatgtaggattgcaacattgaactaattgtagggtaagccttagccaaataaggaaattcgtcaataactaaaattacacgttgtttttgagctaggtgtgtaatttctttaaagcattcctcaaaatttgcaaatttttcttttccaccctgatctgtatttttaaaaatactaattgcatcagaaaaacgttttagattatcttccgcattttcttcaagtgctacataataaattgactttttatcttttaaaaactcattgatcagtgaagtctttccaattcttcttcgaccatagatcactgtaaattgaaaatcattttcttgatacgcctgattcaattgctctaattcttgatgtctacctacaaacatagcgcactccttttcactacatcgtaatatactacattatattatactataacacgatatagtataacgtaatgtacgtgtattctatttttgtaataaaaatggccgttacttagagaaatagcgaagatcattaaattttaacatgctataataacaatagaacaagaataaaaagttttagcgtgcgcgttgaggtagctcctcaacttagtcattaacgtgtggctctgctttggcaaagcttttttgttatgttaataccctacaaaaaagaccgtgcatccctgcacggtcttttcatcttatcacatctattttctaacgtattcgccgttcttgtacttaaattcaatcttcttgttaggcaattgaaccgtaattctgcgatatacaggaccgaagccgtgcttttcaagcttaactttcacgctaccgtccttgtttaccttaaccttgtacaagttgtattcgcccttttggtacttaaagtcagttccgttatcttgatagtgaacgtacttaccctttttaccaaatagtctaaaggtcatactctcgtctggttcaccagagatgtggctaacttctttaccccatggcaagatagtgttcttcttgataaacagtggcaacttgccaattggtgcatcaaccaaaatcgtggtctttccagcatgttcaacaccattccagaaatcaatccattttccttttggcaaatatacggcacgcttggtttgaccttcttgaacaactggggctgccaaaatgtcctcgcctaccatatattcatcattcaagttatacacctgtggatcattttcataattaaggacaagtggacgcataattggcaaacctgtcttagtttcacgatagaattcatcgtaaagatatggaatgaaacggtaacgcagcttcaagtacttacggtaaattgacaaggttggttcgccaaatatccatggttcttgtgagcgagttcctagagccgcatggtttctgtacaatggactaaacaatgcgccttcgatccaacgagtcaacaattcaggtgttgtgtcagcaccaaagccaccgatatcagtaccggcaaagctgaatccactcatacctaagttacataattgtggaatcatcatttggacatgtgtccataaactttggttgtcaccagtccaaactgtggaaaacttttgcgttcctgcatatgctgcacgcgtaatgacaaatgggcgttttccactgaatttcttcaaaccttcataagttgccttagccatgttatgaccatagacattgtgcatcttcttatgagttgaagcttcttcttcattatggaagacgatattttgtggaatttcacccttgaaggatgcaggttcattcatatcgtcccagatacctgaaacaccaaggtcaactaagtacttgcagttcttagcccaccacttacgtacttctttgcggccaaagtctgggaagactgaatcgccaggccaaacttggtttacataaacagtgccatctggagcctttacgaagtagcccttttcgataccttccttgtagatcttatagtcatcatctttcttaacgccagggtcaataatcgtgattattctgaagcccaatttacgcatcttagctacgaatttctctggtgactcatagttatcttttctccaggtaaatactctgtagccgcgcatataatcgatatccaggtgtaaaacgtcacatggtaagtcatacttacgcaagttttcagcaatcttctcaacttgcttttgactgacactgtagccccaacgtgattgttgatagcccaaagtccacttttgtggcattggtacacgaccagttaaataagtgtagttagtaataacttccttgagtgagtcaccaccgatgatgtagtagtcaatattgccatcaaccgctgagtagtagtaatagtcattactttccttacctaagtcgatgtggttgcgataagtattgtcaaaaaagataccgtaaggatgaccattttttaatcctaataaaattggaatcgacttatacaaacgggtaaagctctctacttgcggatcaggattgtcagtattccaattatcataagcatagtggcgtttgttcaaatagccggttttatcacccaagccataaaattcttcgtcatctgctagtgacttgaccacttcataataatcggcgtcatgctttcccagtaatttatccacatcatggccttcagattcagccagcttcaaatgttcctcatccatctgtcggtcaattggggttcttttcccccgataatctacgaccaatggattgccttgttcatcaaagacgtcaattttttcatcatcataagcttttactatcaacttagccgtagctatttcaatatgatcgcctttatttttaactgtaaaatcagttttaatttctttatcgccttcgatagcataagaattgctagcattacctcgatcttgaaagaatcgcataatttccggtgttaacacggtcaaaatcattggtccattctcatagtttaaggtaattttttgtccatctttagtaaaatcagtaagttgattaatcataatttacctctaaaaaatcaaaagttatgtattcgctttcaattttaacacaataagctaatcaattgggtcataccagaaaaaacaccttcagaaatttttgtatttaaatacaaaaaaactgccttacggcagttttatttaatttattccattggaaaaatcttatctggattcaaaacataatttggatcaaaaacatgcttgatctttctcaaaagttcagtgtaatcatgaccatagaaatcctcaaaccaatctttgcaggcataaccaataccatgctcgccagacatatttccatccaaagctttagctgtcttataaagttcggtaatcacataatgactcttttgctcaaactcttcgtcactcattgcatctgagcaaagataaatatgtaaattaccatcgccggcatgaccaaagttaggaattcgcataccaacctcttgttccaattcatcaactctatgcaaaacatcaggaatatgattaattggcacacaaatatcaacttcatccatctttggcgtagacttttgaatagccaaaagcaatgcttcccgacaagtccaaatcttctttgcttcctctgaattagcatctaaaattaccgcatcagctgctttaaacttcttcgttgctgcaagggcaagctttaattccgcatccaattcctctttagttaaagaatcaagccctagaataatgaagccatcgccatttgcaatcgggaatttttcatcgtaatacttttcccagagactaatgacttttctacccataaattcaacggttgttggcactacaccagaagccaaaattgctggtactgatttaattgctttatccaaattaggaaacggaataattgcattgatcgattgtttaggacgtggatataaacgcatggtaacttcagttactacacctaaagtcccttctgagccaatgatcaggtcttttaacgaataacctgatgaggacttaactgccttagcgccaaatttgtaaagtttaccatcagttaaaacaaccttcaattcgcggatatgttctcgagtaacgccatatttaattgctttcaacccaccggcgttagtatccacattaccaccaattgtagcccaatgcattgctggagctggcatataagtaaatggtttattggctaaatattcttcaatatctttcaaccgaatacctgcttgcacagtcatcgttagactttctggctcgtattccaaaaccttattcattttcaccatatccagtgaaatgccaccttcaacggttaaattgccacccattagaccagtcgaattaccacgcggaacgataggaatatgatgatcgcttgcatatttaacaacgttttcgacttcttcattagtttcaggttgaattaccaagtaaggcattgctctaaccgtcttaaattggtcatgatcccaatgaacagttggcttagtaatgaatcgctctggatctgagataaatttactcaaattatctatatctgttgcagttaattttttaaagtccatctttgacacttctttccaaattgaaacatcctatattaactaatgtatccgcttttgtaagcggtgtcaaaaacaagaactgaagatttttttatctaaaaaagcaaatttccatactacctcactttaaaatgcgatagtatcgactttcatttaaataactattacacaaaatatgaaaataaaaaaactgccttacgacagtttctagttaaataaatccgacatcttagttggaatattattgtttttcacaaaatactttttaaaagtaggtaaatctgcattttcttttttcacatacatatcatgtaaagcccaaaatgcagtgattaacaaattaacgcccaagacaattaacataccgattaaaatatatactaagtaaagcattgatctatcccccgctatatcgtcacttgacccagagtcgcatcttcaatgaagtatctgacgaaagcttgattgaagctcatgccctggccgttgtaaacatgccactcttcgcgtttggcacctacagttctaatgattgaaattactgtgcaaattaccaaatatgcgattagcacgttaaaaattattttcattaccagcatgtctacacttcctctctgtactactcaactaatacactaatatttattagtcaatttgtcaacatcttttagtatttacttttttctccccaggtataaaaagccatagatagctggtccgatcactaccgccccagctatagaaactataatcactgcaataaagcgaggcatagcaaaaaattccgagctaaatttcatacaggcccaggccccaaagaaaaaaatcgcccagccaattaaaattgaaattagcatatttaaacctgaaaatttaggtttagagtttttattgttcatcaagttttctctttcataaaaatattgtgccacaaattgaaggtcaataaacaaaagtgacagattcggtcgttttttagacttatttggtaaaaaataagggagattaagtaaaatatggcgcttaatctcccttttgaatcaataattatttgcccataagacctgaaaaagccattcctaaggcagcaccaccacatgcacctgctttagctgatacgggacgagcataactagtaattgcataatgaaacttcatcacatcatgtgacaatttaccctgccagcttaatggatcaagaccaactcgaattaagttgcagacataattagctgattcaccattttctaactcatgctttgcatcaagtaggatttttctttcttctggcttagtatcttcatttactagtaggtcagtaatattacttaatagccattgttttaaatcatctttattttcttgatacatttttatccctctttttcgactttttcattaatatcaggatgcatccctacaaccattttagaatctttcatgttcttcatcgattcatttattttaataaaaaactctgcaagtagcagagctttttacctcattgcagagttacttatacatatacttagcacatgcttttttagaatccataccattacgaatcttcaaagctaattcaatcgatacatccgcaataattgattgtgggtcaatcacattgtaaggatgatctggtgccttttcctgagctaacgacaattctgtacatcccagcaagattacgttgcagccataatcatcatgcattttttgcaagatctggtggtacaatttaccatcaaccattcccttttctttaatatcggaataaatgagcttattaaccatcggttgaatttccggaccacctaattctgcctcacggtgaaccgcatgaatttcatccacatacaaatgatcatagattgacccttcagtcgcaatcaagccaattttcttttcttgtgggtatttttcaataaattgatgcactgctattctcatcatgtgtaaaaatggaatatcagtcaatgcagccaaatcatcataaaaatagtgagcggtattgcatggcatcacatagaagtctggtcccaatttggcttggcccagaacatcgtcacgtaaatcatagaaaaagtttggtttagtatgatctttaatataagccgttctatcaggaatttgtgcatcattaaccaaaatataatttaaataatcttggtccttagctatttttacacggtgattaattaaacgaacgtagctttctgtggcaatagttcccatgccgccaataatactaaagaagtgtttcactattttcacttactttctaaagtgttcttcttgaccttccaactcattaattacctgctgtgcaaccacaatatcagatggatatggggtatttactccgcgaattttttggaaagcgtcagcccccttaccacagattagcacaacatcatctggcgtagccatggcaatcgcatcatgaatggccttcttacgatctaactcaatagtaacgtcgcacttagagtgatctattcctgaatcaatttcttcggcaatactctttggatcttcaaagcctggatcgtctgtagttaaaaatgctttatctgcgtatgcagtcaaactttcactaaaaccgggacgacgtgacacgcctttatcaccaggagctccaacaacaacaataattttaggatcgttgaattcgttacgcataaatctcattaaagccatcattgaggccttattatgagcgtagtcaactacaaccatgccgtgcttctttgttctctcggtttgcatccggcctggaatagtaacatcgcgaatacccttcgcacattgatcatggttaagtccagccaagcctgctccaataattgcggcagtaccatttgactcgttgaaatcacccagcatctttaaagtataatcaccattaattggtaatttacgtgccttatcactagcacaaactaaattgaaccgagtttctttcatatctaattgttcagaagagaatctgaaatcaattggctgcttcaagtctggattttcaaaattatcgcgggcaaacaaataaatactatcggggttggtagtagttgttgcggcagcgtagacttcatcaaagtgtgcagtttcagcgttgataatacatttacgtgagttaacaagcaattgtaatttgcagtgcaaataatctgcaaaattagggtgttcgttaggaccaatatggtctggactaatattcaggaaaaagcctaaatcataagttaaaccgaagacacgatttttcttatatgcttgactagaaacttccattaccaagtgagtcatgccattatcaacagccgttctcatgtctcggaataagtccaaactctctggtgtggtcaagcttgacttaaagctatcttcaggcttaggaccgaccacatcattaactgaagaaatcagagctgtcttaccaccatttgcttgatcaagcatccctttcaaaaagtatgctgatgtagtctttccctttgtaccagtgaaagctacaacaaacaagtcatcttgtggaaaacggaagaaagcagctgacaaaagagccattgccttagaaacatcgcgcacaattaaagcgtgcattccttttccttctggatatggttgttcagctacataacaaatggccccattgtctttagccattgacaaataagttggtctaaagcctgctcccttgcagaagaacaatgtattagtttgaatatcgcgtgagtcataagacacatagtccattttagtagctactgtatcttgcactgcgcttgacttgagcaagtgatgctcttttaagatcaatatacaggtatttaaggaaatactcattaacttttctcctcgttgtatttaaaacatttcagtcaaaattataacacagctagtgtgttggtgacgctttcttcggatcaagtggcaaacgaataataaaactagtccacttttcgtttgattcacagcgaattgtaccatggtgtaaatcaaccacacctttggtgatagataatcccagaccagttccgcctgtcttagtatttcgcgaagtttctacccggtaaaaacgctcaaagattttatttaatgatttcttcggaattggtgccccattattttcaacgcgcaactctacttcacgtttgttgactaaattggctaccaatttaattttagttgcccctgtaccatacttgaaagcattagaaatcaaattattgtaaacgcggaccagcttttccgcatcagccttaatcgttagattctttggccgcgcttcaatctctatttcaatgccatttttttctgcttctaattcaaagccggccgctacctgctccaacattgaataaatatgcaaatcattcagatttaacttagtattggtcgactttaaagtagtatattcaaacagatcgttagccagtgctttcatttgttctgccttagtataggcaatattgacatactttttctgatcttctggcgaagtcactcctgcttttaacaaaccaagataaccaataattgatgttagcggcgttctgatatcgtgcgaaacattagtgatcaattcatccttagattgctcaattgcccgttcttcattaatcgaatttacagtactatcaaccaacgaattaatcgaatccactactcgttgcaattctggtcgtacccgaaaattaatccgatgatcaaaatgaccattagcaatatagtgaagttccaaaataatgtgacgtagctgcatttggtgatagcgtcgaatcaagcgccagtacaaaacaaccaagtcgcccactcccattaagacgatgaatacgttttgccaggaccagagatgatagccacctgcaaaagtgatcgtcttttttagaaagtagattccgttgaccaggctttcatcctgcaaaatagctaagtgaatcagaatgataattgataaatttaataaaaacagaaggacgaccgttacgaccccttctgcaaacaattcgctcttttcggcgccagttagcttgacgcgttcttttttcatcttatgcctcgaccttgtaacctacgccccaaacagtttggatgacatcctcaccatcagtggctttttgaattttatcacgaaggtgtgacacgtgtaccatgacagttttagctgaaacaattgattcttgttgccaaacacgttcaaagatttcatcagctgaaaaaacacggttagggtgactagcaagtaagtataagataccgaattctaaggcagttaattggatagtcttaccatcaatagtcttaacttcatgtgaatcacggttaattaccaatggtcctacttccaaaatatctggtttttcattcttaacttgcttttgacttcttctcaaaagtgaacgtacacgagccattacttcaagtggattgaatggcttagaaacatagtcatcagcaccagtgattaagccttgaatcttgtccatatcaccggttttagcagaaacaataataattggaatatcggagtcttttctaacttccttaattacatcgattcctgacatatttggcatcatcacatccaaaatcatcaaaacgatatctggcgtagtggtcaatttagtaattgcttccttaccactatatgccgcaacaggttcatatccttcatttttaaggtagatacttaatagttctacgatttctttgtcatcatcaacaactaaaattttcacgaggaatgttcccccttcttgtttattattctctgtttttctatctacagtttagcagatatcatatagaatattttacacattttagaaaaatatactgctttcattatcctttttaaacaaaagctaaaaaaatacacgtttctccatcatgaaaaacgtgtattcattctatttactttaccttatcatcatgcaatttagtttcgacataaacgcagacgataaatagcaaagcaaaacagcagatcttaggtgctgttgcataatcaagcatgctagcaaaaccgaataagataccatctggaacaacccaccaggagccgatcgaagaattaaaggtatcactaactgtcgcaaagaatgcaattaaaatcgttaaaacaagtaaaactgaagttaagatcattcccggccgaccaaaatctttaaaaccatgatcccagtagactatcactccaagcagtaccaataagattgataccagccatagactaccctttttcataataaaggccttctttctgcccttatcctaacacgattaagtagcagctgccttgtttaacgcttattgaatttccttcttgccagtgtagagttcatagtagtaacccttttgcttgattaattcatcatggttaccatgttcaataatatgaccatgatcaagtaccaagattaaatctgagttaacaatcgttgacagacggtgagcaataacaaaactagttctaccagtaagcaagttgtccatcccggcttgaaccattttttcagttcgagtatcaatacttgaggtagcttcatcaagaatcattactggctcatcagcaatcattgcccgcgcaattgacaacagctgtatttgcccttgtgaaaggtcgccgccatcaccatcaatcacagtttcataaccgtgatcaaggtcatggataaattcatctgcgtgtgataacttggctgcttgataaacatcgtcatcactggcatctggattaccaaagcggatattgtccataattgtgccagtaaagagatgggtttcctgtaaaacaattgaaagtgattttctcaaatcatcttttttaatgtttttaattggaataccgtcataagtaatcgttcctgaatcaatatcgtagaaacggttaagcatgttagagatggttgtcttacctgcaccggtttcaccaactaaagctaccttcattcccggtttggcattaatggaaatgtcatgcaagatttgatgatctggtacgtagctaaagttaacatgatcaaaaataatatgaccacgaacttgaaccttcttggttgagccatctttttgtggtacattccagtaccacttactgccgacttcatcgtttttcttagaaagagtaactgtaccttggtcagcttctgacttttgatcttccaagttgaaaattctttctgcaccagctaaagccattacaatagagtttaattgttgcgaaatttgggcaattggcatactgaattgcttagataactgtaagaatgaaccaatggcaccaagtgaaagcggagcccaactattaattgcagcagcaccaccaacaaaggcgatcaaaacgtaaagcaagttacccatgttacccataattgggaataaaattgtagcgtaagtgttagccttacctgaggcttgacgcaactcatcattatatttgtcaaagccttccttagattgtggctcatggctgaagaccttgatgaccttcaaaccattaagcatttcttcattataaccattgatttggcccagcttcttttgttggacttggaagaagtgacttgatctaaccgttaagtagcgcacaattccaaatgataaagcaaaaataatgaaggagaacacagtcaattgccaactaagtgaaaacatagcaactactacaaataataaactcaaagctgagttagtaaattgtggaattgactgtgaaatcatctgcatcaaggtatcaatatcgttagtataacgcgacatgatatcaccaaattcattttggtcaaagtatgaaattggcaagctttccatgtgaacaaacatttcgttacgtacacgatattgcactttttgagctaaaacacccatcagcatgttaaaaaggtaattagacaaaaaaccaatcgcatagatcccaaacattaccgcaattgcagtagctagagggccatagttaggaactttttctttagttaaaggcacaatataattattgatcaaacgttcaatgaataacgagccaataacgttgctggcagctgctagcacaatagtgatcatggaaacgatgagcatccatggacttgtactattaaccagtttcaataggcgcaataagattttggttctgctaccctttgtttgatttttacttttttccattgcttgatccaaattgctcacctactttccttgttcttcctggaatttagcgattgaactataaagttcgttagtcttcatcaattcatcgtgggttccgatagcttgaatttgaccatgatccatgacgataatccgatcagcatccttaattgaaacaattctttgtgaaataatgattttagtagtttctggcatatctttagccaaagacgttctaatttgtcgctcagtactggtatcaacagctgaagtggagtcatctaagatcaagatcttcggattcttaagcaaggctctggcaatagtaattctttgcttttgcccaccagaaacgttgttaccaccttgttccaccattgtgtcataaccatctggcatttcacgaataaagccatcagcatgggcgattttagcagcggcaattacttgttcatcggttgcattttcgttaccccacttgaggttatccttaatcgttcctgtgaacagcacattcttttgtaaaaccatcgcaacgttatcacgcaaggtcttcaagtcatatgacttaacgttgtgtcctgcaacccgaacggcaccagaagtaacatcataaagacgcggaatcattgaaaccaaggttgacttcgatgaacctgtttcaccaataatcccgattgtttcacctggcctaatgtgcaaattgatatcttttaaagcatcagccttgtccgcaggttcgtacttaaagctaacgtgatcaaagataatttcaccattggtcaaacgtttcaatggcttcttaggatcttcaattgttggttcttccgtaatcactgaccactggcacctgagataaccaattgcgtagtaatcatagctaaaatgtttaaactaaacaaaactgagtttgaataagtaaacattgaaattaattgaccagtttgtaaactaccgccaaccacttcttttgcaccgaaccagcagattgacagcgttgaaatattcaaaacagctgcaactactaatgcgttcaaagacataatcttttgtgcagtcgcaaacaacttgtaaataaagcctgatgacttcttgaattctttaatctgcggttgttcttggacataggtcttaacttcacgaataccacgtacgttttcacgcacaacctggttcattcggtcataccctctaaaaatcttaggaaagtatggataagctgttttaataatcaaacccaaagcaattgcaaaaaccggtcctaaaactgcaaagattaatgataaacgcggactaataataattgacataataattaaaacgatgaacatcattggtgctctaacagcaattctgatgatcatttgatatgccatttgcacgttgttaacgtcagtagtcaaacgtgtaactaaactggcacttgaaaagtgatcaatattttcaaaagaatagtcctgcatatggtagaacatgtcttggcgcaagtttgcggcaaaaccagcagctgcatgagctgagacataactcgcactagcgcctaaaattagcgaaataacggttaacactaatagcaatagccccattttactaatataggacatatcccccttcataattccgttatcaatcaaaattccgaccaaatatggaatcagcatttcaatgataacttcaccaataacaaacattggtgagagcaaagacaattttttatattgcctaattgatttgctcaatgttttgatcatagagacccacccttctattcttttattcaatctcgcaaataaaaagataaatggatcatctccatttatcttttttatctatattaagtttaagtatgtgcttatttttacggaaattcaattaacatgcttgcaaaacaggtaaattatttatgttgttgtggccttggtgcaaatgcggaaccaacaatattgtagtgctttctgaataaataacgtacaccataggcagccgccgcgataacgatgtcagctactgctggtaaaactgggttgattacgcgcaatgctgggatttgcaaaatccacatccagacaaacaaaacaactgctatagccaacattcttaagatcagcttaaccaatgaaggacgtttaccttgctgaggcattagccaatcattgtatttaaccatgaagatccccattaaaatacctacactggcaattgtcagaatccccatttgtgaattatacggttggttcttagtttggaataatgcaaggataccacataaaccaacaaaaattgctaaataaagcaatgcgccatcaaccatcaactgccaagttggtgtagccactggctttttcttaggatgaagcatttgttcagccttaattgctggtgaagccaggtaaagcccattggctggttgcccatgacgttgggcaataataatttcactgagcaagccattagtcatcgcaactgcatcagcacgtgacattgaaccttgtttttgcagttctttttctagacgaaaaacatagtcactgttcttgttactcaacttttcacgcaaagcttttggatcttcctgcttaattttttcatcctgagtatcaagctcagcttgcttctttaatttagcttgtttttcagtgttaatttttgtttgatcttgttctctctttgtctcttcagccattcttactcctagacgttaaatctaaattcaataatgtcaccgtcttgaacttcgtaatctttaccttcaagacgcagcttaccagcttctttaaccttttgcatagtttcaagcttgtctaaatcatcaaatgaaacaacttcagctcgaataaaaccacgctcaaagtctgagtgaataacaccagcaacttgtggagctttcatccctttgtggaaagtccaggcacgggtttcaggaccaccggcagtaaagaaagttctaaggcctaagatatgatatgcagcacgaatcaaacgatccaagcctgattcttctacgccttccatctcaaggaattctttcttttcatcatcagccataccagcgatttcttcttcagttgcagcagaaatacctaagcattctgcaccttcgctttcggcatgcttcttaacaatttggtaatacttgtcgctttctggatcagccattgagtcttcagcaatgttagcaacgtagataactggcttggaagttaacaagaacaagcccttaacaatcttttgttcatcttcgttgaagtcgattgaacgagcagcattaccttcttcaagtactggctgcaatttattcaaaacagccatttcagccttggcttccttatcgccttgttgagcaaccttctttaccttattgattctgcggttaacagcatcgaggtccgcaatagcaagttccaagttaatagtattaatatcttcttctggatcaaccttaccagtaactgaggtaatattgtcatcatcaaaggcacgaacaacgtgaacgatggcatcagtttgacggatgttttcaaggaacttgttaccaagaccttcaccttttgaagcacccttaaccaatccagcaatatcggtaaattcaaaagttgtgtgcacaatcttcttagcaggaatcaattcttgaattcttgccaaacgcttgtcaggaacttcaaccattccgacatttggttcaatggtggcaaatggatagttagccatttcggcaccagccttagtaatcgcattaaacaaagttgacttaccaacgtttggtaaaccaacaataccagcagttaatgacatttgttgtcctctttttctaaaatcaattttttatttttacttacttgtctattttatccaaaatttggccgagcgatacgatcttttggcacatattgctctttttttgcattaaccggatcattcgccttagttaatagcttttttagcttccggttaaactcgctgcgcggcatcatgactatgtgcccacaacccatacattttaatttgatatcagcacccatgcgcaaaatttcccaatcattagtctgacaagcatgaggctttttcatttgaactgtatcagccaaattataaacaatttctttagccatctaaatcaacacctaacaaatcaagaatccggttcaattcttcagtcgaagcaaaatcaatcgataaatgacccttacctttttgtgtttctgaaatattgacgctagagccaaacttattagccaattggctttcgctagcccggataaaggccgatttcttgacggtctttttgctgcgaggttttttagcgttcaattcactgactaccgcttcaaccttacgcaccggcatcccttccttgactactcgcttagccagcgcatcaatcttttccttatctttcaaacttaaaagcgttctagcttgtcccatcgacagttcaccatgttggagtaaacgcttagtcttgctaggtaaagtgagcaaacgcaaataattagcaatatatggtcgcgacttacccatccgcttcgaaacttcttcttgcgttaagccaagattcttctgcagcatttcataagcttgcgcctcttcaagtggagttaaatcttcacgctgcaagttttctagaactgccacttccatcatttggctttcgttaaacttgcgaataattgctggaatagtcatcttcttagccaatttagaagcacggaaacgacgctcaccagcaatgatctcatatccattaactgattcgcgcacgataattggctggaaaacaccattttccttaatagaatccgacagttcttttaagctcttatcatcaaatctttttctaggctgataaggattcggccgaatatcgcccaaatcgagttcttggacttcttctgcctcttgaacttgaggctcatcctcaaataaggcttcaagaccacgacctaggccgcccttttttcttggctctttacttcttgagtctcttgtcatgagcttttaacacctcttttgctaaatcatcatataccttggcaccacgagattttggtgcatattctgtaattggctgaccataacttggggcctcagctaatttagtaattcgaggaatgatggtcttataaactttcttgctaaagtaggactgcacttctttaaccacttcagcacccaagttagttctggcatcaagcattgttaacaaaacgccttctacgccaagatctttattaaaatgcttttggactaaacgaattgtgttcaaaagttggctaagtccttccatagcataatattcactctgaactggaatcaaaattgaatcagatgcagtaaaagcattaattgaaagttgccctaatgatggcggacagtcaataaaaacaaaatcgtattgatcgctaattgcatctaaagctgactttaagcgtgtctcccgagccatcattgaaattaattccgtttcagcaccggacaagttgattgtggctggaaccatatctagctttggcgttgaagtatggtgaatagtatcttgaataggaatttcgtcaatcaaaacattgtaaatgtcctggtcaatctctgatttttcaattcctaaaccagaggtagcgttaccttgtggatcaatatccacaattaaaacgcgataaccacggtcggcaattgaggctgctaaattaatggtcgtagtggttttacctacgccacctttttggtttgcaaccgaaattacatttaccatattgttcatccttccctattacttccttttcaattcaattgtgatcttataatcatccggatctttattttctgttactttgactttaattcctgagtcttcggctaacttaaccgccttcttaatggtgttaatttgtacctttaagtctttaggaactcggctaacgacccgcttagcttcttttttagccttaggcttagggttaaagtaaacatccacatcttgcacaatctcttcagtttgtttaacgtttaagccttttgcttcaatttctgtcaaaacgcgatcttgatctgcattacttaagccgatcattgcacgaccatgacgagcggtaattttgccagcaatcaaagcttgctgcacattatcatccagcttcaataagcgcaatttgttagccacataagattgagacttacccatatttttagccaaagcagtttgagtcaaatcatttaattccattaaattagtataagcttttgcctcatcaattggatttaagtcttcacgctgtaagttctcaatcaaggctaatgaagcagcttgatcatcactcatatttttgacgatcgcaggaatagtctgccagcccaagcttttagctgcacgataacgtctttcacctgcaataatctcatattgctcgtcatcgccatcttcacgaactacgataggttggagcaagccatccttatcaagtgtttcagctaattctttaattgaatcatcagaaaattcacgccgtggttgatagcggttaggaaaaatcttgctcaattcaagatcttgaacctgtttattcttaggaatttcatcatcatgatgcataaaagaaaataatgacataatatacccctttctgtttaatgaatcggtttgcgccgcggggtgcctgcttgacgtggatactttttaggtgttgctttgactttttgaactaagattagagttcgttcttcttcgctctcaggtagagtcaattcttcttccttaatcagcttaccgcccagcaattcaagagctttttgaccatcatccaattcatcttcggcttttggtcccttgagggcaataaagtaaccatcttttttcaccaaaggcaagcaatattcactcaaaacactcatccgcgcaaccgcacgagcagtaacgagatcgaacttttctcgataaagcttattttgaccaacgtcttcagcgcggccatgaactaattcgacgtctttcaagtctaacttagtaattaagttctttaaaaaagtcaatcgttttgccaaagaatcaacaatggtaatcttcaattctggctgcaaaatcttgagcggaattgatggaaaaccagcaccagcaccaacatcacaaagagtggcaccatctttaaaaacatcgccaaaagtaaacagcggcgtaatactgtcataaaagtgcttaaggtaaacctcatcttcttcggtaattcgtgtcaaattgacatgctcattaacttcgatcaaataattaaaatatattttaaattgttcaatttgttggtcagttaatttaaaattgtgttttgatagttctaaaataaatttttcaggattcatttttcacccgtgaaaccgtgtttcacacctctaaatttaacgcaaaatgcattgattagtaaagatatttcatcttatcaattatgaagtatttttactcaatcgtcaaagttttgccgcccgcaaaatagggtataataaggcgcaaaggagttaaaaatatgattgttactttaattgttttagcttacttagcatataaaacatatttaggctataaaacaggctttacacgctatatcatcggttcaatctgttccgccattgtctttatggttgccattttcatgcaaaatccatttggtaattggctatacacacaatacactggagaaatgattaagactaactccactaacaacgtggaattaatgattgcacgctttgtcgctttctttattgttttcttcgtgggcaaaatgatcatgaagattgtcaaaagctggattcctaacaaaaatccacatgcgactaacttaggcagtattctcgacaatgtcttgggtgctctagcctccctaattgctagttattttgttgtttatgtagttttgtccatgttcaatgcactacaaaatccatggtttatgcagcaaacaattgattctagctttttgaggtttatcatttacaacacaccggggctttcaaacggtgtcttcaataatatctttaatattggcaaaactgtgggataaaatatatcaaaaaagatctgcttgtatcatactgagcagatctttattgatatgttttaactaaattaatactacatttatgaaccaacattcgatatacttattagcgcaggaagttttatgagcggcggctggttctccccccggaggtgaggcctatgggctacattgatgaaagggttccagccatgtcggtttacgagagtatctccttgatgcttttgttcggtacatttttgttggctttgctgacatatattgaccaccaccaaaaataaaaaacgccgctcaaacatactttggccagttattgagtagcgtttaacgtaaaatttaacatttgaagccgccgctcttaaagcgggctgcttggagtccctaggactcctttttctttagtcattatagcatatttcactaatcaccgaaattatcatattcaatatgttcatcattataaacaaagattgcaccaattcgatcagggttatcatgccaaccctttagtggcttgccagcaaagaataatcgtttgcattcaatttctgcttcaaccgatgttttggtaaaagtagtcacaccagctaaatcagtctttacaggatacccggttctaggatcaatcaaatgatgatactttttaccgttaactactaagtagcgctcatatgtcccactagtaacggctgagcattcaggcaccataactgacgtaatattgtcgcctcgcggctgtttaggatcttgcacaccaattgaccactggccactaattcttttaggcgaatcaccaactaacaagatattaccgcccagattaataattcctgcttcaacgccatatgcacgccacaagtcacgaattcggtcggcaatccaacccttagcaattccacctaggtccagctccatgcccttcattttaagaaaaacagattggtcactgtcatttaaaaccaccttaaatgggtcagttaacagcattctatctttaatttcttcatctttaggaacatgtgcgcctttaaaaccgatatgccaaagcttaacaactggtccaatcagagcattaaagccaaaattctcacggctcttttctactgccaatttaaccaaaccatacacagcactagagacctgtaccggatgttctccagcagcatgattgatatccattacttcagattcatctcgattaacggtaaaaatatcttcgtaatgatcaattaaatcaaatgatttttgcaatagatcacgattttgagtaccaaaaatctgcaatgtaattgaagttcctaaagcatgatgatcaccaaccacctgctctaatgctaaatctttaatcataattatttctcttccaaatataaatcacgcaacgcctcacgtagttctgtcgttacgccaattttttcttgtaaaaagttatcgaaactaccaaaattctgctcaatagcgattaatgaagtatccaaaaaagcatcagaaactgaacctaaaattcgcatattagcgcgaaaacaaagattctcgccctcttcttgcatttttttatctcttttggcccgatagttattaagcatataatttgagtacaaatagtcctgtctaattgtttccatatctacgccaagcagatataacaagactacagttaccaatccagttctgtcttttccttctgaacaatgataaagtacagcacctttttcagtattggccaacagctctaaaattttatgcaagctatgttgagcgtgttctttcaatacatgtgacttgtaacgctcacacatcattctaaagccagcatactgatcttgacgataagttgcgaatacttgggttaagtctttcttaccgcctttggtgttgtcatcaacagaaattggaatacagaaatgctctacgccagggattttgctgtctggacaatggtcacattcagttggtgaacgcaaatcaataatcttagtcaagccataattgagcaaaaactcttgatcatgtctcgttatgttgctaatcttgcccgttcttaataaccgatgcatcttgaccttacgtccctgatagccaacatatccgcctaaatcacgcggattacaaactttttctaatggcaaaatatttggtttcattaatttcatctctttattaagtattttgataaaaaagccggatagtgtccctatccggtaattttactatcacgtggtaagtcacgcaaaattatttgttagcttgttcaacaaatttaataaagttagccatcatagcatctagttgcttaatataatcttcattggtcaaatcgccagtttctttatcaaaattgcttgcagcaccgccaattaagatttcattgcctggcaaaacattggcactcatgtctggtgaaagcaagatttcacgagcatcttcttgcgcacgactagatccttgaataccgtatgaagtaccaacaactgcagccggcttcatcttcatcacattaggaccagcatgtgaacctaaccattcaagcgcactctttaaggcagctggaattgagtgatcatattctggtgtagccaaaattacaccatccgcattcttaacatcctcgatccacttcttagtaacatcatctggctcatcagttctacagaaaggcttaagttgatcgatttctttaacttcaatatcagcttgctcaccataacgcttagcaataaattttgctaaaaaacgattgaaagaaaatggagcgtttgtaccaacaattgctaaaattttcatttaaataagccccctacttagtaagttgtgcataccaatcatcaacttcatcaaagaagtgattcaaaaacttaagtgtacctgcatcggtcaagtcgcctttatcatcaaattgttttggtgccaaacccatcataaattcgtcaccagcaaagacatgagcactaaaaccaggtgcgcccaaaatgctcttcaagcgagtttgcgaacgagacgcaccttgaggcattggtgaagttgacacaataactactggcttatcatggaatgggtgaacagaactagaaagccattcaagtgcactctttaaggcacttgaaaccgagtgttgctgttctggtgaagcgatcaaaaccatatctgcatcagcaatttttttacctaaagctaatacgctagcaggagcatcaacgccttctttatacataggcaagcccttaacagtcgcaaagtcaaaatcatacttatcgcctaagtccttaataatgactttaagtaatttttcgttaaatgagttatcggcattggagcccgataaagctaataccttcataaaaaccacctttcaaaaatcctcttaattatcattatagactaatgtagtttaatttatgtcattttaattttaataacaacaagaaaaaacgccttcgataatgaaggcgccctctactgaatgaaaagcacaaatgattggtgaaatttctatgccaagttatccttaagcgaagcttcttcgtcggcagcaaacattgggttttcttgagtttcgctgagacgattgttaagcatagcatcgtggatttgagcattcaacacattgacgatttgagtttggctgaagcttgcaatctcattaacaatcaatgcagccatacctgtagtagaaatccagttagcaattacgatgtcatgaatcttttgatcatcataatcaacatcaggatattgttccttgaacttttcagttccaagttccatcaaagtgtcagcaatgatcttgctaccaaacttgccatcaacgaacattgctctaaacaagttaacatgagcttgagcaaaatcaatgtatgacaaatccaagtcaattaaaggttcaccaacgtacttttgttgtaaagtatgagttctcaagtcattagagattcttctcaaaacttgattgcgaagatcatccatgttgttaaattctagatacaaaggttgggttgagaagtgtcctgctttagcaatgctacgagcagtcaaaccttcaataccatccttgattgccatcttgtaggctgtatctaaaattttgtctttactaatttctttttttcttgccattttaatgcacctcaatcattgtataaaacatgtgcttttcaatacacttgttttcttttcttcatcactataatatatccaaaaaaataacaattgcaagtcttatacactaacttattaaaaaatattatcatcgcttaaatagcgatgagccgttgtctcctgtaaattgatcataatgtgaagaagccatttcaataactgcttgcttgtccaatccttgtgcagcacaaaacgaaaagaatgcagcagataaaatatagccgcgttcacgatcatctgtcaggttatctgagaacttcatattaatcgaatgatttgcataatccgttgtcaattcaatcgatttattttctggtttactactcattctattgcaacctcttttttgttctaaaacaaataaaattaaaaattcccggatttaaaattgaagtgcaacactaagtgttaaacaaaaaggccatgaagacctaaacttgaagtgacgaaaaatcaagaaaggaagatcttcatgaccaattcaaattctagcatttctaagcactatcatcaattaaccagcgtacaacgtggacaaattcaagcaatgctggattccggcataacttcccgtactgttatcgctcaagaagttggctgccataagtcgacaatcagtcgcgaaatcaaatgcggaagcgtcctgcaaagagacagcagctatttattgtatgagcactattacgctgatactgcacagatttattatgagaagcgtcgcaaaaactgctatcagcgcaatccattgaagcattatgctgtctttttgagaatgctctccagacgctttaaagctaaatttgatgccaccagcatcgatgagttcgttggtgaattcaaaaggactatgccaggctacccttgtcccagcacaccaaccgtctatcgctatattgatcagggcttgctggacataagcaatattgatctgcctatgaagctcaaaagacgcaggaacaagcgtcatcacagccatggcggtcacgctttgcacaagaagcatcttggcaattccattgaacagcgtcctaaggaggttgaagacagaaaagctccgctgcactgggaaggagatctggttaaaggcgtcagacgcaagaatcagcctgctttaatgactttgactgaaagaaccacacgctttgaagtagttatcaagattcctgactatcgggcaagcacatgccaaaggctgcttcaaaaggagattgacagacatcctgcctggtttaaatcaatcacgtttgacaatggctctgagtttgcggatatgaccaagatcaagggctgccagatttactttgctcacccatattctccatgggaaaggggcaccaatgagaactgcaatggtcttttgcgtcaattcttccctaagggcaagagcatgaaagacaagtcaaaagcttatgttcaacaggcaactgatgccattaaccacaaatatcgccgaatcctccaatatcacacagcagaggaactcttcaagcaatatatctcttcataacctaactgttgcacttaatttgacaattcaggaaaattaaaaatttaaaaatttctattataattatattacaaaatcaaaagaattagaaagcgtgtttttatcaatgaaagtttcaacttggcgctcatcatgcacctcaattttaatcgggaaaaaggcctctctttctggcagtatcatcatcggtcgtaatgaagatgctaagactgcttggcctaagcatttagcctttaatccacatcgagataatgtacagaaaaaccattttaaatccaaagacaataagtttgaaatggatttaccaacagctagctactcttattcttcaaccccagaatggacagataagtacggagtgttcgaagaagacggaattaatgaatatcatgtagcaatgagcgccaccgaaagtgcctacgcaaatgaccgagttttagctgttgacccctttgatactgacaaaggaatcttagaagaagcaatggtcaccgtagttttaccttatgttaaatccgcacgtgaaggcgttcagcgcttaggagaaattgtagaaaaatatggtgcagcagaagctgacggaattctctttggcgatcgtgatgaagcctggtacatggaaatcggttctggccatcattgggttgcacaacgaatcccagatgattcctacgctattgtcgccaatcaactagctattcaagaaattgattttgccagtgacgacttcatgtattctcaagacctgcaaaaatttgtctacgacaataaactctggcctaaaaatcagccattcatttggcgtgatatttttggcactcatgacgatagtgacttacactacaacacaccacgagtatggagcggtcaacgtctgcttactccatctgtagcacaagaacccgaaagctttaacctgccatttattcgcaagcctgatgcaccaatttctgcgcaagacgctcaacgcgttttaagcgatcactacaacaacaccgcctatgatttaaccaatcagaaaaacagaaataatgccactttcagacctatctctgtggctactactcaggaatcacacttgcttgagttaaacggtgaaaacatgattcactggctagctatgggtgtggctgcgcaaagtgtttatgtgccattctatcctcaaggcactaaggtaccaaatacctggaaaaatggaaaagaaacctactcaccaaattcagcttactgggtctttaaactggctagcgtcctggttgatcgtaattggggtaagtacggcaccgctttaagcaatacgcaaagtactactaacgaaaaattgcttcaaattagacagcaatatgatcaaaaattagcacaagaaaaggatcaagaacaacaaattaaattagtggatgaagccaatgccaaattagctaaaactgctactgatgcttataaagaattgatcgctaaactaatcaccgaacaaactggtgactcaccgttgcgtttccaaatggatcctaacttataaacaaaaatgcctcaatgaggcattttttcttactattttttcttagtcattaagccgtccatcatttcataaatatggtcggcgtatttttctagccgcggatcatgcgttactagaataacggccttgtcacgctttttcgctaaatctttaaacaattgtcctacttcttccacattttgcgtatctagcgaagcagtcggctcatcggctaacaaaatatctgggttagcatataaggccgtcgcgattgctactcgctgctgttgcccaccagataattcatttggatacttattaaccagcttttcaatccctagctgcttgagtaagccttgcaatttatcttgcgacaaattattttgcttttttactttatcaatcaaagtaaattgctctttaactgtcaaaaatggaactaaattataagcttgtaaaacaaagccaattttattcaagcgtagttctccactttgcttagcagaaaaattactaatgtctcgaccattaatcaaaatttcacctgaagttggtttttgcaaggacccggcgatcgtcaaaaatgtacttttaccggcgcctgaaggccccataattaaaaccacttcacccttattagcctgaaaattgatatctttcaaagctgcaactttagcttcgcctttaccataaactttattaacatcttttaattcaattactgccattttactcaccaattgcctttgctggatcaaccttcaaaattgatctaatcggaatcaaactaccaataatacccatgactagcatccctaacgtaccactaatcataattgctggcgtaaaagtcattggcacagctgctggtaaagttaaatcagttaaccacatcaagataatcgcaattacaacaccaatagctactaaaattatggattgactgatcgttgcaccaactaaagttttacttggaattccttgagcccgcataacggcaaaattatgcattttttgcatagttaaaatatataggaaaacagcaatcacgatcaaagaaataacaaataagaatccaatcatcaattcaaaagttaagttttgagccgtatatcctggaagcttattaataaaggcttgaattgggtatgtcttggcatccttataattgaatttataattgctattctttgaaacaactgcagaagcggctacattaggagcgaccatccgcagttttttccaagttttcattgagccataaacaattggcgcaatattaatcttggcgttatttacaaaaccaacaattttatattttttcttagagccattcagagaaatttgatctccaagcttgtagcctttgtctttgaaactactgtctactgtaatctgattaccattctttgcttttttcccagcaattatatcttgatcttgataaataaactggtcttttttgatgcctaagaattgagctgaaattgagttttttccctttttcttaactacaattcctaattgaccaataattgcttcattcttgccaatttttgcgttttttaaatcgtcttttgtcagaattgactgactcatgctgatattggcatttttatttaaaacaatcttttgcgcattccaattttcaattgcttgtgtattctgacttgctaacccaacagccaaagatgacaacataaaaattaagtagctgatcaaaaagatcatcaaaataatcaagccatagcgcaatttttcatgcttaatttctttcagtgctagaaacataactacatcccctttgctagtatgtccaggctcttcttatagcgcgccaagttcttttcctgattttcgggatctgataagcataagttgataacttcatgactaagtaccatggcactccacaattgtggccccatattcaacaattgtcttgaataaattttgaaattatgtggtatcaagtactcattttgcgacatatgcaatttcatcattggttcatatttactgtattgaactttatcaataaacttaactactcttgcataaaaatgattaggatcaaatttttcattaggactcatcccagcatgaatgtcttcaatagcgatgtgatacatataaacatatgcatcaattaaatcatcaaaatatttataaaatgctcctcgagcaatgttggcattcttaacaatatgtgacaccttagcatctgctaacggataagtgctgaattcttctaacaacaccgcttcaatacgtctacgtttagcagacggtaaatttttaaaagtttgcttaaccattttgttttccccttttccaacacaaatgacgacttgtcatcaattacttatatcatagctgattttgacgagttgtcaatacatatacacaaaaaaagaaggcctctgccttccttctctaaactaaaactcgattatagtagtacaacctagcaacaccatcacggacgctaaatttgcttaatgcacaattatttggcgtatctatcttgtccatgtcgccattactcaaataatgagctgccatcattcgaatcaaacgaccatgtgccactactaataccttaccttctggatatttttgatatatttcgtctaaaaagttagcgcaacgtgcttcaaactctccgtagccctcaccatttttggcatatttaacatagtcgcgagtaacttttccccatggatcaacgacatccggatattccttagcaatatcatccatcttcttgccgtcccaatcaccaaaatcaaattccagcaaacgtttgtctaaatttaatttctttttacctttagtaaaaattttcgcagtctctactgctctcttcattggactggaataaacaacatcaaatttattttcatcaaacttagcggcggattttttagcatattcacgaccaaattcattcaagtctgcgtcaacttgtgcgccctgaattcgattatctttattcacgtctgtttgtccatgacgaataaaaactatttccattttttacatcaccttttcttaaaatcatacccttatttaactaatctttccatttctttactgtttttttagcgttttgaaatttaaaaagcttaaaatataaatagataattagaaaggggaaacattatgtcccgcgttacaattgaaagagatggtctcaccttagtaggagaccgcgaagaaccattcggcgaaatctatgacatggctatcctcatgcatggttttaccgctaaccgcaacactgaattattaagacaaattgccgatgatctacgcgacgaaaatgtcgctagcgtccgttttgactttaatggtcatggcgaaagtgacggcaagtttgaagatatgactgtgccaaacgaaatcgctgacggcaaggcaatcttagaatacgttcgcaccgatccacatgtacgtaatattttcttagttggtcattcccaaggcggtgtaattgcatcaatgcttgccggtctttatcctgatgtgattaaaaaagttgtccttttagcaccagctgctcaattaaaagacgatgcacttaaaggtaacacacaaggcgcagtctatgatcctaaccatattcctgatactgttccactagtcggcaataaattaggaatgaaactaggcggattttatctccgaaccgctcaagttttaccgatttacgaggtctctgcccgctttagtggcccagtatcagtcatttatggtactaatgaccaagtagttaaccctaaatatgctaaaaaataccatgatatttatgaaaatagcgaacttcatgccattacggatgtagatcacagattcactggtcaatacaaaaagtcagcatcagatttaactgctcaatttttaaaaccattattttagcgccgagtaaagtcgaactcagtacgaaagacgtaatgatccttagtacttacgtcaggttcaaattgaaattcaaaatcattaaagtcctgcaaatctgtgggattttttatttgcttctcggcaatgtagcgcaccatttcaccacgagccatcttagcgtgaaccccaacggtcttccacttaccattttttagttcctgaaagtcaaccgtaattaattgtcgtccttgactcaaataaggtttaaccaaacgtgtatattgcttggaagccaaatcgataactatattatcttcttgaaataaattttcagcgatatcactgccccagaaataatacaagctataatcacgaaaaccaaccattttagtatttaattctaggcgatatgggcaaacaccatcaaaaggccggagcataccataaaatcctgatagaatccgcaaattcttttgaatatagtcaagtgcaggttgtgtaaataaatccggagccatatattggtattgaattcctgaaaaagccaaaattgcaggggttaatcgttcatccaaattcatattttctagttgcaatatgctttgcttagtcacattttcactagcatgccaaaggtcttttaactgttcatttgaccttgacttaagaaatctttctagaattcgtgtcttatccaagaactgcggttttgactgaattggaaatgaatcacgatcaattttcataatttttgcaggtgcaataataattttcatttttagattttgttcctttacggtaaacttaaattgtgattaataagtcatgtggtaataagtcaaatgaaaggcgatgatatttgttctttttgatcataaatttgagtatatgaaactaagccttggtaaaggttgatttttttaatgttaaacttttgtttacttttaaatttagaccaatttttgaaattaagacctcggtgtcctgtacagtttgtcatctttgagcaatttaaagataactcgtactaattttcttgcagttaatgtgcaagcacgtttatgcggcgagtagacagcttcatcatacttcttttggtaatattttttgaaaacaggatcatgtaatcttgctagattggcagcttcaatcaagtaatatcttagatatctgtttccagtcctggccattggagtatgttcgttgctgtgatctcccgattgatattgattccaggttaggccggcatacttagccagctgttcttctttatcaaagcgatcgatacttccgatctcagcgataataccagctgtataggttttgccaataccgggaattgattccagaattttgctttctggtaatgcatcaacgatacgatcaattgctttttctagatctttaatagattcattaaagctttggatcatgttgtaatgaacagaaagcactgcatcaattgaatcagtcattactttgcctaagcgatatgaacctctaacagctttcttaattgctttagccaaggtatctggatcggaaaagcgtcctctgcctttaacctgtaagtaagaaattaagtcttcggtaggcatatccgcgatctcatccagagttttactatcggttacaatagacatcattgtagcaccgaaaagaggagtattaatcttatctttatcgacagtgattagtttattaacccgataatataaagcttcaatgaagtgctgtttggtacgagtcagttcttgaactaattcatatctggtacgcgttaaacgctctaaagcaagatagttgtcttgtctggcaatgcttactcgataatgtccaaagcttagatacaaagcaatgtaataagcatcgagaggatcagttttactttcttcaaagactttatgaaacctgctggtttctttggggttaattacatcagtctctacattgagcttttgtaaatcttcgtcattttggaaaaagtaagcaggatgaaaactgtaaatagatgtagcttccatgccaataatgatttgatcatagtgtttattttgagctagatctaaaatttgttttttcagttcactagcaccataaagatcattgacaaagctatcgttaattaagcgtttgttttgatcttctgaatcaagtgcaacgacctgtaaatctttagaactaacatcaataccgacaaataatttcattggaaatggcctcctttctttcaaatttctgatcatagattttgatcttcacatgttaacccctaattacagttcttaagttcaatctcgccagtataagtattcactggttgcttctttgaaagctgcacctaatcccaattgctcaaggactagcaaaaagaagcaatcaatacagcatgtgagttagagcataaaggaactgcctgggtggcagacttataaagcagacaaaactgcaggaggtgataacctagaccagttgaccaaagccaatgacaattagaggctaacatgcgaagatcaaaaagcaaatactaatttgattaattatcacaatatgactaattacaatttatataatacgaggaggaaaaataatgaatcctgattttgcaattgtcttaaattatcaacttaatgataaggctgatgccgactttttagtaaaaacagcccgtaatatcggtgctcgtgcagtgatgactgacaggcaaactgaagatttcaaaacagcttgcgctaagtatactatttttttagctaatccagaaaatagtactgacttaactaaggataacgtcattgataccatggtcaataaccgtaaagctggtaagactacaattattaatgtgcccgttgaagcaggcaagttttctgccgcaactcaagcaatgctggatacgatcaatgattggatgcaccaattcggtcacgccttcaacgaaggaaaaactagtgctttaaccagtagcgatggctttattttagaaaatcgccacgcaaattaccaaaaatatgtcttcttacctagtcctcttcctgacaaaatcgtggtagaaggcctagtcgaagaacctaaccgggtagaatggattgaacatcgaactgatcttgattttaactataaggatcaaaaattaactattaacttagtcaaaccagatgatgagtttgcttggcaagtgttgcgaattcaagcccaccgacctgaagatgacattttagaaacgaaattttagtaaaaaggcgttctttgtagcagaacgcctttttacaaccttatgtaattgctatttctattttcaaaaaaatttattcttgcttaagctttaactactgaaccattatcaaaaaattctctaaaacgacgtgcttctttatccagagtaatttcatcattaacttgcgataacttatagccaacaaaataaggtggcgcttcaaaacgtgtaatatatttagcacaaataccgtcatcattacgcggataaaagaatagattataagaatcgcagcggccattatacatgatatttaacaaatacttggcaccactttgaatccagtcagcccacaagtcaatgctatttttatctaacaagttaatattgagctcagtgtagccttgaacggggtgttcagcaatgttaacttctaccccacttttttcaaaaagggtctcaccttcaaaattattcgggtgaatatatttatagccatcttcatgttcaaagccaactatctgcatatgcgggtgaatcaaggaaccacctgaatgtggaccatagttcttgtaccaaacaattgactcatattggtcactagcctgcactttttcaaaacaagctagcgcaaaatgcatcaacttgcgattatgttcctgcgtataagtactaatatcgccgttatgatcactagattcaattagtacagtctgccaggtatcgcgcaaggtcgggaacttattcttaagccaaatcatgtcatcttccttggcgtaaatatcagttaaattttcaacatcacaaaatgggcaaacgtttttcttcttatccttacgataagattgcggtttgcctttagcaatgctcatttgaaaaacaagtggatcattagtcatatttattcctttttttatttaaaatagtttaaaatctaatgggtaaagttttactataatgtaaaatattttgtagctttactagcataaaaatacttgttatactttgttaaagcaaacgtttattcgaaatttatcaagagacgggttttaataatgcaatctagaacagaaatgagaaagcgaaacaatcgcaacaatctctatcttattattattggcataattgtcgtaattgcaattatttgtggctttgtcattcataatcaaagggtagctgctgaacgtagccagcgtgaatatgcttctacccacttcaaccctaatgtaacaatttatggtgtgcaagtaggcaagcttactgttaacaaggcgactgctaagatcaataaacaagctgataatgtcgtctttttaagaaataaaaagattattgctgaaaaagacgacaaggttcaaactatcagccaagctgaagttaaaaatattttcactaagcagcatactgatttgccaagcaaacaaaaatacgttttcaaatccgccaaaatagatgaagcaaaaaagagtttgcaaaaaatacaaaatgctgtagtcacctataagatcaatggccaggaattcaagctaaaagctgatgacctaattcacgaagttacttacaaaggtggtaaatataaattcaccgatgtaaaaaaactgcatgctaaaatggaagcgatcgatcaagaagtcaaaactctaaagaagagttataaatttactgttcctactggtaacaaagtcaatggcaaaacgattacggtaaaaaacgaaagctatggttggggaatttatgtcaagaaggctgtggctgcagtagaaaatgcttttattaatggtcaagatgttgttggtggtagtaagtatatttatggcgagggttatagtacctatgctcatggttatggcaagagcaatcatggtattggtaaaaactacgtcgttgtctccatcaaaaatcaggaactatgggttgtccgtaaagggaaagttgccgttcacttaactgacgttgtcacaggtactgaaaataagagtaacgctactcctaaaggtgtttggtatatcatgtacaaagaatcacctagcgtattgcgtggttataacgacgatggctctaagtatgcctccaaagtacaatattggatgccatttactttgagcggctgtggcttacatgacgctagctggcgtagcgattggagtaagtcagcctatcttactggtggctcacatggctgtgttaacattcgtccagctgaaattagaagtgtttggaacaacgttttaactaacgatgctgttatcgtatattaaaaaataaagattaatcgcctacttcaattgaagcgggcgatttttttgcgtaaaattaacagaaaagatatagatttttgaaaggatcaaatatgttagtcatcggtattatttgcttggtggttgctgccatttcttactttaaataccttagtgaaaagaacggacaagctaaccaaaaacaagctgaaaacaaaaatgaggcaaaatggcagcgcactttagcaatcattttcctcgttttcggaattttattaatcggttattggattgcattacgctaaaaaagacgtgaattttcacgccttttttaaatataattgattaccacattacccatattagctcttccctttaaaactaaggtaggaccgccgccattgctttttcctttaactattacattaccaaggctaatgcttaattgattatcaatctgccatgataagggaacgtagagatttacatttcccattgaagcagttagattaagcacgactgtatcacctgctgctttagcatcatcaagatagatattggcattaccgaatgaagtttcaagattaattgactgtaaattttgtgaatgaatataacgtgaagaatcgccagccatcttttgattaattacgatattgtcaccatcttcaatcacatcttgaacatgatgatgtgttacttttgtctctgtatcagcatcgtcactatcatcgtcatcattccaatgaaaactcttcttgataacaatttccggatcttttttaaaaagcaagctcaatcccattgaaacaagcaaagcaataaacaaaatcatccaagaggataagaactttttaatgcccaggggacctgcataagtaattactaaaaaagcaattgagaaaacggacaccacaatgctcttatcaagcaagcccttaattaagcaagccacaaaaatgactgtcaaaataattgtccaaacgctaattttgaagcttaataagcctaattgactgatcaccaaaagcgcagctgcagcgattagtcctactccccacaaaattcttgcaaaactgtttttcattataaagaccttctttcatctaagcatgtgcgtaattctttgtagtatcgacgggatgcatatacagttttataagtatcatgaaactgtatcttgcaatctgaaatcgaccgagttaaaccataaatttgatctaaattaataattgtcgatttggaaatccgcatgaaacctgcgcccaaaatattttctaactcatacaatttatgtttaaccaagtatgccttatcttgtgtatgcaaaattacctgcttggcatctgtttcaaaaaacaaaatctcgttcagtggtaagtagtaagaaacattgtttctaaaacattcaatctgatcattgtgttcaataccttgtaatttcttataaagctgctctatttccggagaaatatttttagctttaataatcagttcatcttctacggcatctggatcaatctcaagttttactttcatgtttctcactcccttctgaatctgatatttatattaaaaaatatttcagatagcttttccatagttttgaactaagtggtaaattttggcttctaagtggcaaaaaaaataagacgacctctgtcgtcttattgcttattatcaatgtaaactagtaaaaaatgttatcagtccaaaaataattcctggaaaattagccgtgaatagcggccaatctttcttttcaccaagaattgcataaagtacccagatcgtgcaattaattgcagcaaccaacggctgaaccggattaccataatttccgttcaaattattaataatttgcggaatatatgaaacatacatcagtacagataataccgacccaatacgtccaatagttaaaacagtttttcggtctaatcctttgaattttttcaacaaatcgctcctttgtgcttcattataagaaaagctagagtcgattgcaaaaatcatactttagtggacaccttccattagcacattaattctcttaactaaaaagaacattattaccgcaaaggctacactgaccaaaccaacagccatgaaatattgtacttcagtgccagttgaatagaacttaacaatttgtgcattcactgcttgtccagttgcatcagccatgaaccacatactcatcatttgcgaacgatatgcattaggggccagcttggtcgtaattgataaaccaattggtgaaatcaacatttcagcaatttcaactaagaaccatgaaccaactagccaaaatggactaaccttgcctgctgtaccataaagcatccctggcaaagccatccacatataagatagaccagcaaaaactagccctgctgcaaacttgcctggagctgttggctgctttttccaatgttcccaaagccaaacgaagattggcgttaaaatcataatgaataatgggttaagagactgaaagttggctgctgtaaagtgccaattaccaatatgaagcacggttctttgagcggcaaacagagctaaaactactgagcctgattcttcaatgccccagaagatagctgcagcaaagaacaatggaatgtaagccttaactcgtgaacgctcaaccttagttacttttgaactacgtagcatcatcacaaagtaataaattggcagtgcaattgctaaaatagtcaataaagtaatgacattgtcaacgttcaattgaccaaagccggccattgcagctaatacaagggcaatcaccacgaacccaataactacccacttaataatattaagcaagtcacctctatcaataggatcattaggcgtcaaactttcaggagaaaggtattttttaccgccccaaacatattgcactaagccaaagaacatcccgattgcagctaaagaaaagccggcatggaagttcatttcattaccaaaaatatgaaagccaaaaccttgtgctgcccatggaactaaccaaggtgcaagaaatgatcctaagttaatcccaaagacaaagatgctaaaacccgcatctcttctgcgatcttcaactgaataaagaccaccaaccatgtcagatacatttggctttaataaaccagtaccaaccacaattaaggcaattgaagcatataacgccgttacaccggctggaagtgccaagacaatgtgacctaacatgatcaaaacgccgccataaaagacggtttttcttgaaccccaaacacggtcagacagccagccaccaactagggttgataaataaacaagtgaaccatagattgacatgattgatgcagccgttgtttggtccattcccagaccacctttggtgactgcataatacatgtagaaaagcaggatggcgcgcattccgtagtaactgaagcgctcccacatctcagtaaagaataacgtggacaaaccctttggttgtccgaaaaatgctgtatttgaatcttgtttccccaaataaaaactcccttcttatcatagataagcacaatagaaataattataccacgaaaaaataaggatccactttttacagtgaatccttatttattaggtaattattgcttcaaattaattgattgccttagcaactgcgttgttaacagccactttttcagcttcgatcaagtcaactttaccttcaataactttaatatccatcttaatttcacgactaagaagtggaatatttacctttggttcaaagaattctttaaattctttaagtctagttggagtatggaagacgcgagtagttactgtgatgaatgttgtaaattccatgtcaccaccgacagtcttatcaagccaatcccaatcttctctaatccagtcccaggctgcttgttgaccatgatggttgctgagcaaaccagcataccagccacgcaagtcttgtggtttaattacgtcagcattttcaaaattatcaacaattaacgcaacttcggccggatcaatcgtactagtaattgcgctacgaagatcaactttgtatgaaggatcagcagttctttgatattccttgattaggttttcgattaggttgtggctaccaaagttctttacttcattgattaaaacatacggacgaacatcagcattcattgcctctaagttgtcttcattagcagtgaaaatctcatgagctgttttaattgagtctttattttcagcgtaaagactggcacttaattcatatggacgaatttgtgcatcttcatcgctttcacctggcttaactttccagcccaaacgagcaacttgaccagcggataacttgtcataaagcttctttaagtccttttcttgagctgattcaggttcaacaaattggcgcaacttagcagcagtagcgtaaagagcattaataactacacttgacttcgagtcagcaaatttagtcaaaagtggcacaacagcagcataagaaatttgtttaccttctgctaaaagacgtaagtcttgcaataattgcaatttggcaattggatcaagttcatcaacatgagccaaaatatcatcaagcaaagtcttgtcatacttaacgataaagtgcgagttgttacctacattaattctaagtgggtgacctgcttcactacgtaaattcttgtagtaacctaagtcgatttccttatcagacataatcttaggtgccttgaagttagcattcaacggaatttgccattgtctaccaacgtctttaccttcaccaacgaagaattgttgttgtgaaagctttaagtgaccatcgctactatcaacatatgcactaactactggataacctggttgctttaaccatgagtgcataatcttgccaatatcaaggtcagttgcggttgaaagagcatcccaaagatcgtcaccagtggcattaccgaacttgtggtggtcgaagtaatacttcaagccttttcttaaggcatcgtcaccaagaagtgaacgaaccataactaacattctagaacccttggcataaacaatggcactgtcgaaggcagagtcaatatctgctgggtcattgatttccatttgaattggttgaacaccgtcagtagcatctctagtcaaagctgcaggtgcttcactggtttggaacatttcccaaatatgccaatcaggttctagaccatcaactgccaagtattccatcatgttagcaaaactttcgttaagccataaattatcccaccatttcatggttactaaatcaccgaaccattggtgagccaattcgtgagtaataactgtagcaaccaatttcttcatttcaaagctagtattgtctggatcaagcagtaaatatgcttcacggtaagttactaacccccagttttccatggcaccagcactgaaatctggcaaagccaattgcaatgattgtggaagtggatacttagtttggtaaaattcttcgtaaaattcaattgcgttcttagcaacacccaaagcaaagtctaattccttaggcttgtgggccttagttgcataaacaccaattaagacgccatccttagtgtgagtagtctttgattgcaaatcaccaaaggcaaaggcaaccaagtaactagacatgcgaacagtttcttcaaagtggtggtagccgtccttgtccacttcaacctcaggcatattggcaagagcaacttcgccatcttcttcatcccacttaagcgcaagactaaaagtagccttagcttctggttcatcaacacatggaaaagcttgacgagcaaaagtagtttcaaattgggtaccaataatttgcttcttcttaccttctaactcgtagtatgaaggataaatacccatcatagtatcagtaagtggtgcactataagcaatttcaattacagccttgctgtttacaccagttgaaattttgatagcttcctctttttcaagtacttcaaaatctacctttttaccatcaaccttaacgctgtcaatggtcatatatttttggttaataaatactggattttcaattacttcaccggtaatcgttgaagtaccattaatttctttttgtttacggtttacgttaatgcgcaaatcatagtgttctggatggaaagtttcataaaaacgtttaactgtcattttttacctcctattaacagctcatttacttttaattctaccaaaataaagaaaaaagcgctcaaaaaaggctatttcttattgattgtaaggatgacgtttcagttctgtaacattgctgtcatattgagcttgtactatagaagcatagtcattaagaaataaataagttttgaaagaattaattaaatttaataaggaatgaatacatcaatgaataaacatgttaaatctactttagtaaaaatcttagctgccttagcacttgcctttgcttgtgttgcagttgcaaatgctttttctaccaatacttcaactactcaaactgttcaagctgcaagaaagctttcaaaagctgaaaaagctgctaagagatggatcgcaatgcgcgaatcaggtggtagctacactgctagaaacggtgtttgttacggcaaataccaattaaacattggctacttacatggtaacctttcacctaagaaccaagaacgtgttgctgataattacgtttacggtcgttacggttcatgggttaacgccaagagattttggttagctcacaactggtactaaaattaaattcctttaattcccaaaagctaaagaaaaccagcttagtccaattgactaaactggtttttgttttactcaaaattatcttgcttgataaaacgataaagtgcaatgactaaaactaagatcgagcacgccattcctacataggccattgttccaatgtggacagcattgtcagcagcttcacgggctacttgattttccattgcatagcccacaacccatttacgcattaataccggcgtcaagacaaaactaactgtactaataattgaagtcactaacgctacattacgcgaatatggttctttaaagaactgtgctaatacgcagaatgctggagcaatcatcaatagcaagatccacataataatccagcgcccagaacttgaattcatcatctgcgcactattagtggcataacgatatgagctccaaagcgatccaccagataaggtattaagcaaactcaagaaataagatccacgttgtccataaacaccaccattattggacagaataccttgaacaagttggaaactatcagttgatccagccgatgaaaaatcgaccgacacaacttgcttcatataagtagctaaaaacatggtaactgagccacctaattctagtgctcttaacatgcttaattttcttgaagctttcagatgaaattccagacttaaaactcgatcaggatggtgactgtgaccaatgataaaaatccctgcaatgacgatcaaggctaagataaccaatccccaccagaatttaatcatggcgaaaaataaggctaaaacaataatcgcaaccgaaatatatggtcggtcagaaaaaatattccaaaagttcaacttaacatgatggtaatttttccttgatgcatttgcgacattttgattaataatcggctgaggattactaatttttctgctgcgaaattcttcacgtgttgttgctcttgtcttagtataatcggtccgtgaacgatctgcgccggcttggccgtgctcttttttcatgcgatattcacgccgcgacatatgtgccataaactgcagcccccttctcaaagcactatagtagcacattatcacttttttgcttgaattaagaatgaaatttcaaagaaaatttagctttgttttgcatgtgctaaaatgaatattaataattgtgctttttttagaaagagataactttttgaataaaactaaatcagcaaaactgccagctggttggcatatggccttttataccttatggctcggttgctttatcactgggatgggctattcaatgacaatgccctttatttcactatttatttcagatttgggtaattattctaaactgcaaatcaatctttattcaggattagcttttgcaatgacttttattgcccaggcaatagtttcaccatattggggcagcctcgctgaccgcaaaggtagaaaactaatgtgtatgcgtgcttctggtgtgatggctttaactattaccctaactggatttgcacccaatgcaatttatattattgtaatgcgttttattcaaggttctttttctggttatattaacaacgccaccgctttaatggcaagtgaaacgccgcatgaacgtagcggctgggtcatgagtcaaatgatgacggccgggactgccggaaatttggttggaccgctattaggtggtgctctctccagcttctttggcaatatgtttggtggcgcctgggggtatcggattccattcttcattaccggtgttttaatgttcatcgtctttttaggtacaacgttcttagttcacgaagactttactccaatttctcgtgaaaagatgaagccgatgggcgaaatcatgaaaagtttgcctagcgtgaaattgattgtggtgatgtttattactaccatgttggtacaatcatcaaccatgtcaattgatccaattgtttcattatacgtaaaatcaatgatgcctcatggcggggatgttgcctttgttgcaggtgttgttgcggcaacgcctggtcttggaacgctaattgcggcatcgcgaattggacacaagatggatgaagttggaccgttacgcgtattgcgaatcggcttagtcgtcggtgcccattgtttgtaccaatggctttgactaattcgccttgggtactagcaggactgcgcttcttattagggattgctagtgcagggatgttgccagccgcacagacggtattaactttaaacacaccaagcgaaagtttcggtcgaatctttagttataaccagtcatttcaagcagttggtgccgtgttaggatcgttaatgggatcgactatttccggtttttcaaattatgcaacggtattctggctaactggatttacgttactgatcaactttgtgcttgttttgatttttgcttggggaatttcttatcggaatagataggttaagcatattcctaaagtatggaatttaaaaatgtaataaaagagctgtaaatatcacaaaaaatatttacccggatttaaaattgaagtgcaacactaagtgttaaacaaaaaggccatgaagacctaaacttgaagtgacgaaaaatcaagaaaggaagatcttcatgaccaattcaaattctagcatttctaagcactatcatcaattaaccagcgtacaacgtggacaaattcaagcaatgctggattccggcataacttcccgtactgttatcgctcaagaagttggctgccataagtcgacaatcagtcgcgaaatcaaacgcggaagcgtcctgcaaagagacagcagctatttattgtatgagcactattacgctgatactgcacagatttattatgagaagcgtcgcaaaaactgctatcagcgcaatccattgaagcattatgctgtctttttgagaatgctctccagacgctttaaagctaaatttgatgccaccagcatcgatgagttcgttggtgaattcaaaaggactatgccaggctacccttgtcccagcacaccaaccgtctatcgctatattgatcagggcttgctggacataagcaatattgatctgcctatgaagctcaaaagacgcaggaacaagcgtcatcacagccatggcggtcacgctttgcacaagaagcatcttggcaattccattgaacagcgtcctaaggaggttgaagacagaaaagctccgctgcactgggaaggagatctggttaaaggcgtcagacgcaagaatcagcctgctttaatgactttgactgaaagaaccacacgctttgaagtagttatcaagattcctgactatcgggcaagcacatgccaaaggctgcttcaaaaggagattgacagacatcctgcctggtttaaatcaatcacgtttgacaatggctctgagtttgcggatatgaccaagatcaagggctgccagatttactttgctcacccatattctccatgggaaaggggcaccaatgagaactgcaatggtcttttgcgtcaattcttccctaagggcaagagcatgaaagacaagtcaaaagcttatgttcaacaggcaactgatgccattaaccacaaatatcgccgaatcctccaatatcacacagcagaggaactcttcaagcaatatatctcttcataacctaactgttgcacttaatttgacaattcaggcaaaaaatatttacagctctttattattttcaattttttacgctaccatcttttcataaatgcgatacatccgattatcataagcgcacattgaaataaccagattatagcccgcgttttctttctgccacttttcaattgcgtcaactgcgatcttagttgcatcttctgcaggatagccatacacacccgtagaaatagctgaaaaaattacgctatgcaatcccgctttctttgccaaagccagtgaattatagtagcaagaagctagcatatgtgcatcactagtcttgccagcataaactgggcctactgtatgaattacatatttcgcaggtaaattatagccatgtgttatccttgcttcacctgttggacaaccatgcaaagtcatgcattcctcaagtaaccgtggaccagctgctctatgaatggcaccatcaacgccgccaccaccaagtaatgaattattagctgcattaacgatcgcgtcggctttcatcttagtaatatcgcctttaataatttttatgtctttcataattatgtccttagaaataaccaacatttctttctaccaccattctaacaccaacaacatcagttaggctcagaaagaatacaaagcatattgttatttttatattacgaacttgaattgatttctatctttagtatcctaatattaattttagcgttataggagcaacgaaatgaaaattttacgacgcagtttatgcatcatttcgatcaccttattttcttttgctttgagcattctcattcctagtgttcaagctagcaaaatagttttagatgatctcatcatatttttatatttaattggaatcgtaattctgggcattctgttgttgtctaacaaatttgattacctatcactcagtctaagcataatcttgctactcgcaactatcattgcttggatcagattcccaatgattagcattatttatactttttttatagcttatctgagtatatgcttactaacaatttttattgctaaaaggattaagaaataagtcactatgttttctaagaaagaactaaaaatcatcaataacgcattaattattatctatttgctttcagtcggcccaacattcagagactgtaaaatattttgtgtaaggatgaataattccttaaatttatttcttaaaacattagaaaaaggagttcctttctcgtatgattggtttgaacaaaaaaacacatacagaaagaagaactccttcatgaatgattttacaaaaaatatagcacaagctctattcaatcaagacaaaataaacgatttattgcgcaaagagctacaacaggctgttaataacttgctagaagctgaattgactgcctttctgggctatgatccctatgccagaaatggctggaatactggcaattctagaaatggtgcttatttccgcaaggttgatacgcagtttggaccaattgaagtgcaagtgcctcgagatcgcaacggccagtttcatcagcacacgctgcctgactacaagcagcactctgatgttttggaaagcacgattatcaagctctactccaaaggcgtaactaccagagaaatcgctgacttgattgagaaaatgtatggcagtcattatagtccagcccaagtatcaaatatttccaagcagatgctccccaaggttgaggcttatcacaagcgcaagctaagcgacaagtttttctgtgtctatttggatgcgacataccttcctttgcgccgagaaacgtttgagcgtgaagcagtctatattgccattggcattaaacctaatggacataaagaagtcattgactactgcattgcgcctagtgagaacattgaagtctggacagagatgcttcaaaacatgaagtccagaggcttgaagcaagttgagctctttctttctgatggtgttgttggcatgaaagcggccttgaccaggacttatcctaaagctcattttcaacgctgcttggttcatgtcatgcgcaatatctgtgctaaagtccgggtggatgaccgcgaaaagatcatgaacgaattcaagcagatacatcaacagacaagccaaaaagaagctgcagctgtcttgcatgaattttatgcaaaatggaataaagcttatagccatgttatcaaaggtttgagggaaattgagcccgatctgctggtcttctacaattatcccaaacaaatcagagcttcaatttattcaaccaacatgattgaatcctttaacaacgtcatcaagcgtaaagctaagcctaaggcagaatttccaactgaacagtcgcttgatgtatttattggcatccaggcaatgagctacaatgaccgctatttcaaccgaattcataaaggctttggtcaggttcaggataccttagaatcctattttgattaaataaatgattaaaaaatcaatttacgagaaagaactatttacacaaaagatttgacagtttcaacattcatcttcggttttactaaatcaaatgatttcacaagtactttctttttaattgcaaatatcattttagtttgtttattcattatcattgctatcagaattgctaaaatcaatttcaggctaaagacacaatattatctactaggcttcatcactcttatttcaataatagaactagcctaccctggactgacattaaatgaacgcattagcaattattttgctatcggcaatattattttaggcttgctaactactaaaatctcaaagaaattagtttaaatataggacacaaaatgaaatatctgaaaacaccaagattaattaacagtattttgattactttacgtcatactgctataaattattgaattcttattactttaaaactacatcaggtattttcaatcattcaataaaaaataagactagcactaagccagtcttattttctattaatcaactattcttggggtgagaattgccatactgttccatcttggctacggtatgagccatcactcatctttgtaaatataaagacaacttttttcgtcctaattgtgtaaccgttttttgattcagttgtatcaactcggcccaaatcagccttaacacctgtttggggtggattatttttcttaatagaatatgcttgtaaaatttctttattaagtttagtcttcttttgctcagagttgttactatttttagcaactaaaatagcatgattctttgtaaaatacagatcaaaccaattacttaagcgattttctgtgttgtctactgttaatgttcgattaacccagtttttaggtaccgttgtttgattattgtagaaaaacattccaccaataactgctacaagtactgtaactactgcaattacggataacgtcattttctttttcatgatacgtttcctcttaaattcagcattaattatttggcactaagcctctcgaaatgagtcttacatttcctgaatacatgctaacccatcggtttctatttgttttaaaattgtgatccatccaggtactgtttctatacaaatagccactgtaggcaccatcattataataaactttagaaggtgttgtgttgagtaagttcattccatctcccctaccccaactactgtatctataaacattagatacatatttatgaagcggaccatttttgattggcccatacactttaacactctttgcttctcggactgtagtttctgaagcctgaacattctaactattggtagttaatactggagctacagttacacctacaagagtagcaaccactaataatattgactttttcatttttatttttcctcgtttaattttgatgttagtactactttcttacgaacagaagcaggtgcaggaatgctctttacatcatagctgtacaaatatcttctatataaggtagtagcactcttaccaactttttcacgcataacttttgaaagatatcctctataaccgttatactcaaaatagtgagtggcaccataatcataacttgaacctaaggtgatccaaattctcctaggtttatagtaatctgctcttagttttgaactcacagttgtttgtgtttcagctgatgcgctaacctgattcgaaactgtaaacaaactaacgccaactaatcctactagtgataatgaaactagttttcttgaaattgatttcatttttatacagataaagtaccttcactctctggccaaatcattattatttcctcctttcgtatcttgattatcccatgaaactctaatattacttctaaagttgcgtatcacaaaactactctttccaattagtcaccctatcttcatatcctagagaaataagcatggcttttacttctttagcttttgctatatttccttcatacaaacatttatagaaactcccacatgccttataaaaaagaaaatgattagtattgttcaaattcagtaagtaatctaaacaatttttaacctgatttccttttaagccataattacgccagcaataaaggtaattgatacaaatacttgctatcctatcttcatatttctctgaatatgaaaccttctcattgtaatgtttcaaaagaaaactaatataattatctgcttgttctgtagaaaaaacaggaatacagttatcgaataatcgcagcatatcaatattttctacccagttatcttttgcattaaattcagcaataattgtacttttgaattcgtcacctaactcatccaattgatttcgtacaattgctactgcaacaactactctgtacttaaatattctgctatcagataatttcattacttcttgcaaacattcttcgattttttctttatttgaaccattaaatgcacttttcagtttgttttcaagttttaattcaattaagtcctcttctgataaaaaatcatctttaatttgttccaaaaactgatctacatcaatatgatgggcaaacaagatcttaaatagactttctgcagaaattccttctattcctcgttcaattttagaataatggcttttatgaattattccttgaatcatttcatcttgcgttagtcctaagtgtattctttcttgtttcaaggcttcaccgatagtcatctttcatccctccaatttaacttcaactatactatctttttaattttctctccatacaaaaacgccttgctcaaaagcaaagcgttttttagcataagcaatatttgcattaacccttatcggcacctgcagtaattccgttaacgtagaacttctgcatgaagacgaacaagatggtaatagggatagcgatgattacacaccccgcaacgaattgtgcgaagtatgcggtcgcattacccttagctgtgtggaccatgttgtaaagtccatatgcaaccgtgtaagtcttagcatttcctgaagttgaaagaataatacctgagaaaatgaagtctgtccatggagcgatgaaagcggtcaaggcggtataaacgatcattggctttgaaagtggtaaaccaatgtgtaagaatacttgccacttagtagcaccgtcgatttcggcagcttcgtcgattgaccgaggaatagtatcaaagaatcccttagcaacgtagaagcctaagccggcaccaccaacgtaaaccaataacaacccgaagaggtttaacatgttaagacccttcaagatgtagtacaaagcaatcattgacatgaagcctggaaacatccctaaaaccaatgcaatttgtaagaatggttttctgaatgcaaagcgaagtcgtgataaaacgtaagcaactgaaatagttaagaaagttgaaattaccattgaaagcaatgaaataactaaagtattaatgatccagttaccaaatggatattgtggattagtaaaaataccaatatagttttgcaatgtgaatttttccggccagaaggtcgaaacgaatccagtatcattgaatgaaaaacttgctaagacgatccagacaatcggtaaaatccatagaatcgctaaaacaattaataggatataccgaaagattaatgagagccgtctttgatttgaatatgacttcatgtctagccctccttaaatgcattagtacgacgatatgcaatcagtgaaacagttgcactaataatgaagattaagatacccaatacggcactggcgttataacgctgttcctgaccgaaggtcaagttatataaccacgttaccagcaagtcagtcgatccggcaccattatacttactgttcattggtgcaccacctgtcagcaagaagataacattgaagttgttgatgttaccaataaattgttggataagtgaaggtgccatcacaaataaaatttgtggaaaagtgattgaacggaaaatttgtgcagcattagcaccatcaatcttagcagcttcaatttgatcttgtggcaagttttgaataatcgctgttgaaaccaacatagaaactggaataccgatccacatgttaacaagaataacggtaattcttgcaactaaaggtgaagcttggttatcaataaagtgaattggtgaactaatccaatgcaagttcatcaagatattgttcaaagcaccttggtagtccaagaactgcgccatcatcaaaagtgaaacgaattgtggtacagcccaaatgataacaaagattgttctccagaatcccttgtgcttgattccttttgattcaatcaaaagagcaagcaaaacaccaaagaagaaagtcgtagcagtagctgctacagcccagattaaagtccagcctaagactgggaagaaagtaccagctaagtcaccactcaaaacattgccaaatgcttggaagcctgtccatgagaaagcaattgggtgttgacgatcatagttggtaaaggccattgaaatcatgaagatcgttggcaaaatcgtaaagaacaagatacccaataatggaataaccatcaaggttgcgtgtaaccgagtatcaagcaaactcttaagttcttcaacgttagttggaatatggtccccatcacgcttcaaaatataattatgtctagttgagcgtaagttgacaatgtatagataaatgattgctacacataagatcaaggccaatacaccgaataacaaaatcaaaactgagtttgatggttgcttggttacataaacgccttgtgcggcatcataaacaacttttttggttttaatagtacctaatgtagctaatgaatttaaagtagggataccactgaggataaaccaaacaataaagataatttctgaaagtaagagtgaaataccttttacccattgtttgtttgccaaggcgttactacccattaagaagaatgataacttggtagcaatgtcaccttttgaccaaacctcgcgatatgttgctttaggagctacatgctttttctttagaaacataacttctccccttcttaggcaaaaaggctggacaatttttatttagcccaacccttgcttatgcttttagcaaattatttcttttcaatgttcttagcgagcttagcaagttgtggcttgtattgtgctggcttaatcttgccgtcgtaagtaccactgataagcggagctgcaccattccagaatgcggccatttgtggaagcttaggttgcaatactgagttacctggcttagccatttcgattacagcttcagcaaccgggtcactcttaacagcacttgagttgacagcgctcttcaatactggaatttgaccagcgttcttatgagcaattaattgtgacttcttgttagtaatgtaagcagctaaatctgaagcagccttagcattcttggtgttagcattaactgcgaagccttcaataccaaggaatgcttccatttgtacgctcttaccaccaacttcaatcttaggatacttagcaactgcgaagttcttacccaagatcttcttgatattagcagcgttccaaggaccgtccaaaatagcttgtgcgttacccttcttcaattggttcaaagcgtttgaagtttgcattacgcccttgttcttcttttgagctgcgtaccacttcaaagcattaataccgttttgtgagttgaaagttgagcccttaaggtcttcaccattcttaccgtaaagtgtagtacctgctgagaacattactggccacattacgtaagcgttagtaaagtcggtagctacaacaccctttgaagttaaagtcttccagtccttaacgtcgttagctgataacttagacttgttgtagtaaatggtttgagcttgttgtgcgtatgggaatgcgtaaaccttgcccttccaagttacaccctttgaagcaacatcgacatagttgtcttggatatccttagttgctgatggtgaaagtgggttaatgtaaccagcttcagccatttgacctaattgatcgttaggaacttcaaagacatcagcagcctttgatgggtccttaccaacgtctgtcttagcgttagctgaaccgttaggactttgaactacacgaaccttaatattcttgttcttcttagtaaagtccttagcaatttgcttgtagtaaggaacttgttcagtatccacccaaagagtcaagttagccttcttgtttgaattactgctacttgatgatgaattacttgagccgtttgaacatgctgctaatgataatgcagcaagaacagcagtactacctaaagccattttcttccaaatcttcatgactttttcctcctaaaaaatcaaaacaataaacaattcttaacaacagtagcttctgctacatatggttgtaagcttaattaataattatctgtactgcgttttcagtaccagattagttaacaatcgccttggtggaatctttatcaaagaagtgagctttgttaacatccaagcccatcttaaccttgtcacctggcttgtgataatcacgtgaatttacaatagcagtaaattcagtaccatcaacttcttggtgaagctgaatagttgcacccaaaagttctgaaacaacaacatttgattcaattactgaatctggccaggtttccataaatgcttcttctgagtgaatgtcttctggacgaataccaaagactaagtctttgtcgttgtagcctttttcttccagcagttttgccttaccttcaggaataccaatattcaagcctttgccatcagaaattcgaccgtccttgtagtgaacattgaagaaattcatttgtggggaaccaataaatccggcaacgaacatgttaactggcttgttgtaaacttcaagtggtgagccgatttgttcaactctaccaacagacattacaacaactctatcagccaaagtcatcgcttcagtctgatcgtgggtaacataaatagttgtagtacccaagtcttggtgaagcttagcaatttcagtacgcattaccacacgcaatttagcatccaagtttgataaaggttcatccatcaagaagataggtgccgcacgaacgattgcacgtcctaatgcaacacgctgtctttgaccaccggacaaagcacctggcttcttatccaagtactcttcaaggcctaacatcttagctgcttttttaaccttttgatcaatttcatctttaggcgtgtgacgcaactttaaaccgaaggccatgttgtcataaatggtcatgtgtggatataatgcgtagttctggaaaaccatcgcaatgtgtctgtcctttggagcaacatcgttcattactttatgatcgatttctaaggtacccttactgatgtcttccaaaccagcaaccattctcaaagtagttgacttaccacagccagatggaccaacgaaaacgatgaattccttatccttgatatgtaagtcaaagtcgttaacagaatatctgtcgttacctgcatattttttgtaaatatggtttaaatcaacctcaaccattgtttcccctactctctttaattatttttcattaaaaactttttcaatttcactcaatttcaactcagcagttgttggaacgatgtaatcagcttctttcaaaagctccttatcaccaattcctacggcaaattgacctgcagccttgattgcttcgactccagctttggcatcttcaaaactgattacttcatcagcctttaaccctgcaatttcttgcgctttgatgtaaatttcaggatctggcttaccatgatgaagtgttgctggatcaacaatgccatcaaattcatccataatacctaatctagttaaaatcttaggagcattcttagaagcagaagcaattaccatctttaagttttgcttcttagcatctgccaataactcagggatcccaggcaaaatgtcctttggcgtcattgtttctacttgttcaacaaatttagcgttcttttcagctgcgaacttttctttttctgcttcagtatatttgtcttcttgaccgccatattgcaagatcaagtttaatgaatccattcttgaaataccgcgtaagctatcgagctgagaatcagtaagtgtaatgcctaattctttagctaaattattccaagcagtcaaatgaaacttagctgaattagttaaaacaccatctaaatcaaacaataaacctttaagcattttgcgtttcaccttctttaagagtaagtttttggtctttaactacaacatctaaatcgtcacctttaagcaaggtaagttttgtttcattatgatcgacataaacttcgattaagcgaccacggtagttaatcttaaagccgtagtgatcccacttgtctggtacaaatgggttaaatttcaattgatcatgatcataacgcatccctgcaaaaccttgaacaattgctaaccatgaaccactcattgaagtgatgtgcaaaccatcaactgtatcgttgttgtagttatcaaggtcaaggcgagcagttctttcgtataattcgaccgccttcttttgcttgccaagttcagcagctaagattgagtggatacatggagaaagtgaactttcatgaacagtcattggttcgtagaagtcgtagtttctttccttttgttctttagtgtattgatcattcaagaagtagattccttgtaaaacatcggcttgcttgatgaatggtgaacgaaggatcttgtcccatgaccagtgttggttgattggacgctgatcttcaatttcgcttactggacgaaggttcttgtcaaggtagtcatcttgttgtaagaagatgccacgttccttgtcttctggtaagtaaatcttgtcaacgatgtcttgccacttcttcttttcttcatcagtaacattaaccctggcttgagcttccttagttgctaatggcaaacgctccaaagtgtacttaagtagccatcttgccatcgtactagtgaaccagttgttgttaacgttgttttcgtattcgtttggaccggttacgccatgcataacgtacttgttacgccacttggaccagtggactctagctgcccagaatcttgctgttccaaccaagacatccattccttcatccttaacgtatgaatcatcgccagtgtatgacgtatattgcttaatcgcaaatggaatatcagcattacggtgaatttcttcaaaggtgatttcccattcattgtgacattcaatcccgttgaaggtaaccattgggaacaatgcacctggtaagccttgttctttagcgttatggtatgcgcctggcaattgatcgtgacggtattgtaaaagtgcccgagtaacactaggatcagtaacacataagtacattggaacaatgtaagcttcagtatcccagtaagtagcaccaccgtatttttcaccggtaaaacctttaggaccaacgttaagacgttcatcttcaccgtaataagtcatgaataattgacaaatgttaaagcggataccttgttgagcggcatcatcaccagcaattacaacatctgatttgtcccagcgcttttgccaaacggcttcatgatcagctaagttttcttcaaaactcttagcttgaagcttggtcatcaattcagctgccttagcatcttgatcatctggtttgacgtcacgactagtaacaacaatgacatctttttcaagatcgtagctttcgccttcatttaactcaactgaaagcttttcatgaagttgggctgcttcagttgaaacatcacccttaactacttcaccattatgacgaagactttgcttaaggaggactgtaaattgtggaaccttgtatgggttagccttagtttcaaccttaatagttcttgcttcagcattttcacctaaaggcatccagaattttgcatcgtagttactgtcttcgttaacaacagttccatcaagtgctgcatcaaagtcgattttagctttaccacttaaaacggtagccttaactttaattaaagctgcttcttttaaggtaatatgtaaaaacctttcgaattcgaatttaaccttagtatccttaccttcataagtaaaacttctagtcagaagaccttggtgcatatcaagtgctaagtagaaatcactaaacttaactttagctaagtcaagtttttcaccattaatcgtaattcccatgttgatgaaacttggtgagttaggaaccttaccaaagtactttggatatccgttcttccaccaaccaacacgcgtcttatcagggaaccaaacaccagcaaggtaagtaccttgtaagctgtcacctgaatagccttcttcaaagtttcctctcatacccatgtaatcgttgccgattgcagtcatactttcttgcaatcttttatcttttggttcgaacttatgggtaacgaccttccaaggatcaatttcaaaaattcgtttcatatattctatctcccgtaatattcgaggttctctcttgtttgcgctttcattatcctttagttgaaagcgatttacaatattaaatctgctgttaccgttatcaggattagttaacagaaaaagaaggtagatcttaatctgccttcttttttgcttattaaaagtaacttttaatgaacactcactacaaagccttttggtgccaattgattattctcataatcttgactaaacgtgttctcacaattgatctctactggatgatcggtcgtgttaaagtatgctttaattctttcattcccctcacgatcgacctcaattaacccattctctgttacgtgtaacttaattcgacctttaccgaaagtttcatcatgttgcaaacgaaagtcaatcaattgatgaactcgttgccaaaccgggccgtcttcttttgcccaatccattggtttacgacaatcaggatcgttgccaccagtcatacccatttcagttccataataaatgcatggactacccttttgcataaattcaaaagctaaggcttgcaaagccaaatcttggtctccattagctactgtcaaaattcgggctgtatcgtgtgaatcaagcatgttcatcatggctgcattggtagcatcccgatatttcatcaactggtctgtcaaacgactagttaattcttgtgctgacaacttgtgcttaaagaagtgatcctcaatttgcaaagtatatggataattcattacgccagtaaactcatcaccgttaagccatggacgagctgagtgccaaacttcacctacaatataaaaatctgatttaatatcagtaacgaccttgtggaatttcttccagaagtggtggtcaacttcgttagccacatctagccgccaagcatcaatatcgaagtattttacccaataagtggcaatttctaataagaaatcctgtacttctggattagctgtgttcaactttggcatatgcttttcaaaggcaaaagtatcgaacttaggactaccctcaccctttaatggatcgcggtaaggttcaactggatattcattaatgtggaaccaactagcaaaacgagaacttggaccatttttaacaacatcttgccattgcattgattgatcacccaggtggttgaaaaccgcgtccagcatgaccttcattccgcgggcatgagcttcattaacaactttcgcaaataaatccttgtcgccgaatgccggatcaacttgcaaatagtcaatcgtatcatatttatggttagaactggctttaaaaataggacagaaataaaggccattaacacccagtttcttcaagtaatctagatggtcaagcacgccttgcaggtcaccaccatagaagtcttcgcggccaggatgatcctccggattccacgctttaaccccttggggatcattagacttatcaccgtttgcaaaacgttctggaaagatttggtaccaaacagtatgcttaacccattctggcgttttcaccatatcaatttcatggcaatatggcactttgaaataagaaccatcttccataatggccttgtctacatcactgctaattgcacgatcacctacaactacactagtgccatcactgccaattacttcaaaggtatacttcaaacgatgatatggtgcttcaagcgtaatgccccaatgatcttcacactgccctacgccaattttttccatctcacatgttttagcctgttcaagtggcaaataattatcgcagtagtgaacaattacttttttaacgtcatttttagcactgtgaaaacgcacgcgaacatgacttggatcaactacaaaactatcttcactttcagttcggtgtcttaaagctgctaattgcatatattaattctcctttttcaacacaacacctgcataaggcatcaaagttaatttttcattagttaattgatattctcccgcttttagtgttgcaacagtataaccggctggtatttcaacagttgtcttttgatcactcaatgaaacagctacaatggcactttcatcatgtaaatcacgttgataaacatagctattcttatccgttgaaatcatataatacgttccagtctggaataaggcttcttttttgagttccagcagtttttggtaaaaattaaacatgctggtggtatcgttaatctcgttagctacgcaagcatcatcctgtttaatacctgttatccatggtttaacttcactaaaaccatggttctcagttgcatcccacggcattggaccacgggccggcaatttatgtgtttcactagccatagctaaggccgcatctttgctcaaaactttttctgcatcctttaaccatggcgctacaatttgatcttcgaattgatctgcactagtgaaatgtagattctttaaccctaattcttcaccgtaataaattactggaattccgcgttgcaaatacatcaacatcgccaagctcttagcctgagtttgtgtcttagctacgcgtgtagctaaacgagccatatcatgattattccaataaagagtaggctgcgatacgcctgctaatgtttgttgccaaactacttgattttgtttaaaggcagtcaaatctaatttcttaggctgatattgctctgaaaaacgttgatcacagttagaatcatcatcggtaaagtaccggaaggtaatcacactatccattaagtgattgcgcttagtcgtgtaatcaacagccaagttaacgctagcacttgcagcttcacctaataaaagcgtatctggataatcctgcttaatctgctcacagaaaggccgcatccattcctgcacctgtggtaagttagcgaaaaatggttccgcaacgattggcttgtttatgtccccatctccagttggataattttgtcgcaaatccgccttgccaatatggataaaagcgtctaaacgcaaaccatcaattcccttttttagccaatattcagctacctcaagcatggcgtgacgaacttcaggattcttccagtttaaatcaggcattcgcttatcaaataagtgaaagtatgattgaccggttccagctggatctggctcccaaacgctgccaccaaagaatgacccccaattgttcggccgcttgccgtcatgaccagcaaaaatatagtagtcacgatataggctgtcaggattcttgattgcgtcttggaaccaaggatgttgatcagatgtgtgattcaagacaaaatccatgatgaggtgaattcctgccttgtgcagatccttgattaagttctccatatcttccattgttcccatgtgtggatcgatggcgaagtaatttgaaacgtcgtagccgttgtccacctgtggtgaaacaaacactgggttcagccaaacggcgtttacgcctagatttttcaagtaagggatgcgcttacgaataccgttaaggtcaccgaggccatcgccattgctatcttgaaaagacttaggataaatttgatatataattgcgtgatcgtaccaatgtgccataattaatttcctccacgcatagtgtaacggattaaagaaaccgttttcaacaccatatctactgttatcgatatcaaaaaagcacaactcgcttttgagttgtgccttttcttctattcaattactaacttttagttgtgcttacgtttccgatcaacaccaaagcctaaaagacctgcaattgaagctaatgctaaaccaataatagatgctctgttttgtttttcaccagtttgtggtaatgtcttggcattcttttcagcttgaacagcagtattattactgtttgcgcgcttaccatgaacattgctattgtagctgtgattttcactattcaatcctgcggcctgattattccctgaattatgcttagtctcggtccgaatattttgaccattatttttggctttatgatgatctgctttcttacccgaattatcatcttttccaggtgtcttatcagttggtttattatctgaaggtgtagtattacctccattatcagtcttaacaactggaacagtgattgatgaacttactgaagctgaggttggagcattgtaaccatctttgatcttatatccagctggcacaccgtttttaatggcacttgaaggatcaatagttgtaccttcagtacctggaatagtggttctgccaacttcattaccattttcatcacggtagataatggttacttggccttgttgtggagtaggaggcgtgatttcaccgccaccgtttttagtataagtaatagttacaacagcatccttagtatctgcagttggagttacttcagcaacactatcttgacttggagtaaatccagtaaaggctggagcagtaaaggctggccaagtgctggttgcgtccttgtcaatgataaacttatcgttttcaactttacctaattgccagtcaccgtaaactgttttgacatttggatcagttgaaacagtcttggtgcgaccgaaccatacaacttgagtagaagtatcagtcttacctgttacaggattcttaacgttgattgtacgagttggatgagcgtacatatcactgttttcgcctggcttgtttggattgattgttgggtcggttggctcagtagtcttagtgtaagcaactgttacattagcatttggagtgtcagcattgaccgtctttgcatcaacctttgttgcttcatgcccattaaccgtggacttgtaaccgtcaactggggtgacatcatattcttgccaactaccttcagaggcaccagttgacttccaagaattattatccttagtagcaactgtccattctgtccaagtaatattaccatcttgatccttggtgccagcattttggccttcaccaccacggacaaagtgaacattttgggtaatgatgtcggtagtaccatcagtcttataaatcgtgattgtccgagtgacatccttgttcatatctttgtcggatggattgtatggaactggggtgatgttgtcagactttaagtaagtgatatgaacagcagcaccatttactggttgaccattgttaagtgccgaagcgctagaaacagttgtagtcttagttccattaacatatgaatcataatctgaaatttgtggtgcattcattgagacaaattctggttgaccacctaaaacaaacttgtggttttggatagtgcctgcctgccaattacctgtacccgtaacttcaccagttaccaagtcttcaataccattgcggccaaattctactgattgagtgtcaatcttcttttcagcttcacccggtttagtttggtaaatatcacgagttactgtcttgaacatgtccttgtacttaggatcagttggatttacgcctggagtggttggagtgatgtccttagtaccatgttcaacaagaacttcaattgcacttggagcagtagtgttaactgtttcagctgatggataagtgtaactctttgaaattacccatttttctggaacattactatcaattgtattcttttgagcttctgcacttacaattgctggagtagttgaagtaaattgtcccttaattgcatccttagctgtaaaaatcacattacctttcgcatccttataaacaatgctttgagtaaagttttcaggtgttggagttgcagcttcaacattaattgttgcaggaacatcaagataagtaccatcactaaagttaattcttacagtacccttaacgccatttgcaatattcttagttgaaggctggccattttcagcccaggtcatagtgaatgtcttggcagaatcattggcttgtgctgaatcagatgaattagtgccaccccagccattttcaagactattaacattaatcaaagtcttaaattgatcttgacttaagttagaaatattttgattttgcttgaaagttaatgactgattagtagttgaaccatagaagttgaagtaagtgttcatccaactgtcttgagtagataaaccaatgtagccgaataaatcactgtcatcaaagctatagtttacacgccacttagagttacctggtaggctttcaccagatgaagtttgttccttagagttaggatttgctggatcatagagaatatcaccggtaccatttgtaatatcccaattgctatttggagttaagataccattacctgctttgacccagctatacttaataacatttgcatcaaagctatctgacggatcttgggcattcacatacttatcaccttgtaagttataagtagtaactgtcttgtagtcacttgctgcactacccttaccatcccagtcagttctgtagacaatttgttgaatcttagcgatattaggatcaagttcatgactatcagtggttctgtgaactgaaatagttggtgtgatgaagctcgtcatactttgattgccatagtaggtatgatgctctggatcattaccagttatcataactggagcagtaaccgtttgtgtatccttacctggaacactaactgtaactggaatcttgtagaaccctggtgttgcgtcttgccctggcttcaaagtaatcgtaccagtagttgaatctactgttgcccaagttggaacgttatcacctgctacaaatttagtaccatcaggctttggtacaccatttgttgtaacaactggatcagatgctgtgctccctttttcaacagtaactgtcttataacttggactatattcacctgctggcacagcattaattgcaccatctttggtttgaacgtctaagtaagttgggttaccttgagcatccttatcagtaaaggtaagtctaatagttgcctgagtatcaccagcctttggtgcacttgcccatgaagcagtgtactgaataccggcattatctaagttaaaagtatcaactaaatcattcttttgagcgtcggttaaatcttgacctacagtaaccttaaccgggttagttacatccttagcagtagcaccagcagctttaatcgtcattggattactgtcaacagtagtgtcaccaactttaactgatacagtaccagttaagtcttcacttgcagatggagtagttacaacagttgttggagcatcgcccttccaagtaatgattgcactagtcttatcaactggcgtgctggttaccttaccatcttcaccaacagtgtattgattaattgcactaactgcttgacctgcagtcaaattcattgaattatctgtagtttcatgagctttatcaaatgcacttggagcagttacaacttctagggcaccagtcttagtggggtcagttggatctggaatgatcttgccagtgtgagtagcattgccaacataaactggtacgtgaactgtatccttagtagtatctggatacgttacaacaactggaattgtagtcaagccagttggcgtttcagtcgttggggcaattgttaaccaaccagtattaggatctactgtagcaaatggtgtgttatcaccaacaattttatacttagtaccttctggagccttgctacctgggttgattgttacagcactgccttgtggagttgattcaggatatgaaggatcttctgacttagattcaccttgttttacgttcatcggatcatatgaaggttggtaaacatcagcatcagggttagtgatatttaatggaatattagcaaaatcaacggtaccgtcttggtaggttacctttgcccaagctgacttatcgctagtcttcaaattaccagttgggttagttggagcatcttgaccgctcattaaatcttgccattccgttgcgtcagtagctgcattgtaccaatctacatttttaatagcagaaagatctggtgttatggttccatcgctagtccgtaacccagaaataccgtccttggcagttaagtcatttaaggtttgtttagtattaccatcaatagtcttgactactggttgatattgaccagaatcagttggcttagctacttcttctaaagaactacccattgcaactctttgtggagtccaccagttgaagttattcaagagtcggtttaagtatggagtttcatattttacaccatcagctggttgaccttgagtaactgttccatcaataaactgaaaactattaaacccagcttggttttgagcaagatttacttgaccgtttgagtgtaaaaatttaatttcaccattcttattttgtcctagagtgttgccggcttgagtaaagccagaaattgcattatcaccccagttgttttgagtttcaatattattgagataccagtaatcagatgcacctgtgcctttatttccttcatcccattgagcaaatggcaatttaccacctgcactagtaatagttacattattatttttattttcaagacgaagtaaagtacctgtttgatttccggtacgctggaaatttacatacttagggttggtaatagtaacatggttatagctatcaccagttccaccaccccacatagttaccaagccatatttaggagtattagtgaagaaccctttcgtaactgaatttagaactggctgagcattatcttgtaagtcaagcgtcgcaccttcatggacattcaaatcccacttagagcttgaaccactgcctgaaccaaatgagattaatggtgtagtagattgattgttatcaccagtacgaacaattattaatttaccttgattatctaaaacattggaatcagcattagtaatattagcagcaaaaccaacacctaatgaaataggagcaaagtggtaaccatcataattagttccaccattggcaccactaccatcattactttgtttagtattgatgttaacaacaccagttttgccaatgtttaagttaccagcccaaatagccattgagtgaccatcagccatgttggcatttaaattaccgtcaacttggacagtaccagtaatagcgctgttgacaagcatccctttaacatctttagattggccatttaaggttacggttgcaccttgttgaacatcaattgctggagcagtatcatttgtttcatcttcaactttggcccgcaaaatattgccaccagcgttttgatcgttgttagtcttagctgaacttacgttaaagatagtgttagaaccatccgcaaaaataatgtgtgcagctgaaacagcacttgaataattagaaacttgattccctgctacattaacggcttcacaagtgatattgttattacccttgaaggttaccgtagtatacggattatcacctatttgttgagccatcgtggtgttataaaaagcaccatttttaacatcagcagttacattttcaaatgtaaccttgttgttagctaaaagatcagttcttatgtcgtttccacccatgtaaattgggctaaaggcaccaccataactagaccatgaattatcataaccatcagcgttaatggttaaattcttgaaagcaatatcccaaggattactatctttttgattgttagtagtaaagctaagataattagcaccaaagttaatagcgtgaccttgaccatcaatatctaatcctccagaaatatttgaaccagttaagttcatctttccagagttaactagtggttgcggacgattaataccgttaacatttgtacccttattagcgacagtaatgtcactagttaatttaattgtaccgatattatagtcgtttaaagcattaactaatccttgccagtccgctacttcttgtgattgagtaccacgtaaattttgttgagtggtagctgcaacttctctaggttgtgcagctaaatttgctccaagctcttttgcaacttcatctttggtcttcttagcactgatattattgtcttgctcatttccaagtgataaaacattaaccttaccacgcatggtgctagttaaatcgttttagttaataaaaaagtccaatcttgttagactcgacttgtaaatagtaataatagaaaagagtctgatctgattgaactgccttaagcttaagcgttttagccaccatttacaagttagttttaaagatttagtgataatttgtcggcactggtatcgtttgtatgcaccggctgagtttactcatcagcgaaatattgatcaaattaaaactacggacagtctgattttggctttacttatctggcaagctaagacaggaattgaatcacaaagaagattctgtgaatgtttcaattgtttatcacactcacgttttaatcggcgttcacgtcagctattgcaattgatttatcagatacggcaagaaatgaataaaaaggttgacctgaatggacatttcttgatcattgacagctttccggtacctgtttgccaaccaattcgcaactatcgtgctaaaatttttcgcggttatgccaacattggttataaggccaccaagaaaatttacttctatggtttcaaagttcatgccattgttagcgatgacggttccattcttgattatgtcgtaacaaaagcatcagttcatgatgccaaggagacagttgaactgctggaaaatgcccatccatctaattactatcttcttggcgacgaaggctatttaggcaaagaactgcatcaacagctaaaacaaatgggttatgaactttggacaccatatcgtaaaaatatgacaggagctaaaaagcacaatgatcatcaattgatggctattcgcagaacaattgaaagcgacttttcgcttctgacctattacaatgccgagaacaatcgagcacgtagtctgataggctttcaaagccggttggaaattgcaattttagcttataatttggcttattgtctagaaagatttaactagcaccacgcgtataattcttatgtttatggacagatcgcgtatttaactaaccgtgttatcgaggaagttcacgaaaaagagaaaattatttctgaaatgcaacacgaagcggaagggttgtctgaatataatctactcttcactatccctgaattcggtgttcgaactgttacttctttgatcggtgaattaggagatattcgtcttttccatagtagtaatgctcttaatgcctatatcaggattgatcttagacattattatgaatcaggtaactttgttgccactgatcatattagtaaacgtggtgatgcgattgcacgtaaaattctttttaaatccatccaaaacattgccgtggcaagtcattttcatcctaatcatattaatgatttctatcagaaaaggaaaagacaatcttctcagccagaaactaagaaaattgccattgccgcgatacaccgtcttctcagaacgatttatcatcttgtaaaatataatcaaccctataattatcaaatagctaaagtataatttaagattgattattactattattgtgcaacccatgaaaaataaatctagttcatgagcttgttttgttatactttaaatttaactttgagccattttaattatttaattaacttttctatccagctaaattccaaggaattcctttaatatccttgactattcgtagaaaaccaaaataagcactgatgttaaattcatcagtacttacaattgtagagtccctttgttcaacccgtattgataacgactgcttacaataataaaattaagaccactagaataacagcttatggttttcgcaactttgatcattcccgtatccgaagtctactagctctcaaatctcatggtaaaaactaagctaaaagaaaaggtcagctcaagcagcttcgctacttaaactaacctcatcaaaatacctcatcagtactgacaaaggggtaaaattgtagagctaatttgattacttgcgcttcttgtttacagcagcaaggccaaacattcccaataaggtggaggcacctaagcccattaatgttaagctattgtcattaccagtttgtggtagttggttatccttagctgtcgttggttgagacgtaatcgtcttcccagtttgcatgttaggaacattaccttctagtttgccagtaacagcatttccattaggagtagtgtttgtaggcgtattagtagctggtgttccttgtccttgatgatcattagttgttggttgaccgccattagttgggatcaaccaacaactaatgatttgattagggttaccatccttgaaggtgtaagatgttggaacactttcaccaggaactaattgataaccatcaggaatgtgaatattaactggaactgtctgaccagacttgccaggattgtccggaagcttatcgcttggtgtctttggatcagttgttgttgtctctggcgttttgggatcagttggatctgtgtccttagtgtaaacaaaagttgtggtgtattggtatacagtatactggccactcgttactccaagagtacgaacaagacgataacctttaattttcttaggttggacttgccatggaccatttgcataccagcctttttgcggattaaccccattatttttttggttaggattatctaggttgaacgcaagcgtatcattattcctaagcacatttccttgctcatcaatgtacctcacagttactggtttgtttggtagcaagtaaacatgtatccccttagcgtaccaattgaaataatcagaattaagatatgtccctgtacttcctatataggagtaaccttgtttttcgtaatggctaatctcctcactcatttttttctcataattaccattgtttaggtcaatccttttgccatagctaccagcaatcgtaaagaatttgtacggtagatttgtttcttctggaacaagtaacaattcagtcctattactatcagaattattttttataaccttcttatacttgaaagttaaataaacatagttaggatcagctaacgaatttcgagtttgaccagtgattttaccctttaaaacaggttcagaaactaatttatatccaggaatattaatggctgcggcttcatagcgtgatgcatccggtgctttcttatcaccagcacggtgttgtggagattcaggggccatccagaaactatctagaacgattgatgctaaaatatgcccgttatctacatcaacatactctactttgattggtgacaatgatgcgtaatctaaattaatgttaatgtcttgcgtagtaatacctttcttaaggcaggcattaccttgtttatcaaaatagaaatacttattcaaaacttctgaattcattaatttataaccggccacagtaaattcttgatccacactatcccctggtcgaattgtggtctgcttgaaaggttgtttgaatacataatgaccattactaatcacttgaattggcttatgtatggtgacatcgcgaaaattcatagtaatgttgtacttactgggcagtggttgttttgctgttgttttatttggaactaatgttgatgaagtttgatgaccaaccgtatttgattcgtcgctaatccgaatattgcttgaatgggcactaacttgtggatcagtcacttgagtcgtggatgtattttgagcagcaactgtcgtattatctgccttggcattaccactaataatgaaggttaagcccaacgaaactgtcaaatcttttgtgtaaatagttctttctcgtaaattgattttttaattatttatttaatcaaagtaggattctaaggtgtcctgaacctgaccaaagcctttatgaattcgattgaaataacggtcattgtagctcattgcctgaataccaataaaagcatcaagcgactgttcagttggaaactctgccttaggcttagctttgcgcttgatcacattgttaaatgattcaatcatgttagtcgaataaattgaagctctgatctgcttgggatagttataaaagaccggcagatctggttctatgtctttcaagcttctgataacatggctgtaaaccttgccccatttggtatagaagtcatgcaggacagctgtggcttcttctttgtttgtctgttgatgcacctgtttgaattcgttcatgatcttttcacgatcgtcgacgcgtactttagcgcagatattacgcatgacatgaactaaacagcgttgaaaatgagcttttggataagtctgagctaaggctgttttcatgccaacaacaccatcagaaagaaaaagctcaacttgctttaagcctcgggatttcatgttttgaagcatatctgtccagacttcaatgttctcgctaggcgcaatgcagtagtcaatgacctccttgtgcccattaggcttgatgccaatggcaatatagactgcttcgcgctcaaatgtttctcggcgcaaaggaaggtatgtcgcatccaaatagacgcagaaaaacttgtcgcttagcttgcgtttgtggtaagcctcaacctttggaatcatctgcttggaaatatttgatacctgagctggactgtaatggctgccatacatcttttcaattagatcggctatttccctggtggtcacgcccttggagtaaagcttgataatcatgctttccaagatatccgagtgctgcttgtagtcaggcagcgtgtgctgatgaaattgaccgttgcgatcccgaggcacttgcacttcaattgggccaaattgcgtatcaactttgcggaaataagcaccatttctagagttgccagtattccagccatttctggcatagggatcatagcccagaaaggcagtcaattcagcttctagcaagttattaacagcctgttgtagttctttgcgcaataaatcatttattttgtctggattgaatagagcttgagcaaaatctttggtaaaatcattcatgaaggagttcttctttctgtatgtgttttttttgttcaaaccaatcatacgagaaaggaactcctttttctaatgtttaaagaaataaatttaaggaatcattcatccttacacaaactattttacagtctcaaatcaagctcaagtcctgtcactattgagctttcttagacgtaattagtttttatatgatctgtttcagtgcaatttgtatgaatcgtggcagttggttaataaagtcattgattacttcatctatcttttcaaaactattctgtttaagctcttttaattctgaaattaagtagaccaatgcatctacgaatctaatatcaggtaaggattcgttcattagatagaataaatctccgattgtcttatcatctgtattttgtctttcctgccaggtcaatagatcataagttattgctgtaactgcgatatagccacattggccatcatagctttgaacttgagatttatctaaagcaagatattgcttagacgtcttaaaatatgtttcaatttgccatctacgaccataaagttggatgatttcttcagggctaagctttgtctgagtagtagctaaaaccaaatacttgttcttgtttccacggttggagacaaagacgagctttaataaaaagctatgtccatgatattgagcctcaactatgcttgaataaagataatgtttctttttacggatgtttgaagcagccaaacgatcatacaagtctttaacgctatagcggcgatggcgataaatgtaataaatctttgaactcttcttgatcatgccaagtccatctaaaccgatcttctttaaaatccaaaacattcttggagaagaaaaccaagaatcgaataagacgtatttagcttctactcctaatcgtaaggcttgtctaatcaactctacagttacatcattcatctttctctgagcttgatttctccttttaccagaaattgaacgttcatcagcagtaatgggagcagctccaatcatatttttcttggttttggttgacatcaaggcaaagttaaccggcaagaaggtattgccatcgctccagcctaaagttaaaccacgatatccgttcaaatactcatgcttgtcatggtcatagactttagctagcaattcggtctttttagaaaaagaccgagccatcagcgtatcgtcaacgataaaagcaagtcggcgtcttttatcgataaatggttttaagcagccaatgagccgggctgcaatcaagcataatagtttttgccagttgattcttccatcgttaagtacattgcgagcagttctaacggaaaaacgtttgtcatccttagctctgaataaagaaagccgagcaaaatgtactgacatcagccaagagataatcatggttaatgaaacggtggatttacgcttaaaattgacttgtttagttaacttagctagaccaattagattaataaatcccggatttaaaattgaagtgcaacactaagtgttaaacaaaaaggccatgaagacctaaacttgaagtgacgaaaaatcaagaaaggaagatcttcatgaccaattcaaattctagcatttctaagcactatcatcaattaaccagcgtacaacgtggacaaattcaagcaatgctggattccggcataacttcccgtactgttatcgctcaagaagttggctgccataagtcgacaatcagtcgcgaaatcaaacgcggaagcgtcctgcaaagagacagcagctatttattgtatgagcactattacgctgatactgcacagatttattatgagaagcgtcgcaaaaactgctatcagcgcaatccattgaagcattatgctgtctttttgagaatgctctccagacgctttaaagctaaatttgatgccaccagcatcgatgagttcgttggtgaattcaaaaggactatgccaggctacccttgtcccagcacaccaaccgtctatcgctatattgatcagggcttgctggacataagcaatattgatctgcctatgaagctcaaaagacgcaggaacaagcgtcatcacagccatggcggtcacgctttgcacaagaagcatcttggcaattccattgaacagcgtcctaaggaggttgaagacagaaaagctccgctgcactgggaaggagatctggttaaaggcgtcagacgcaagaatcagcctgctttaatgactttgactgaaagaaccacacgctttgaagtagttatcaagattcctgactatcgggcaagcacatgccaaaggctgcttcaaaaggagattgacagacatcctgcctggtttaaatcaatcacgtttgacaatggctctgagtttgcggatatgaccaagatcaagggctgccagatttactttgctcacccatattctccatgggaaaggggcaccaatgagaactgcaatggtcttttgcgtcaattcttccctaagggcaagagcatgaaagacaagtcaaaagcttatgttcaacaggcaactgatgccattaaccacaaatatcgccgaatcctccaatatcacacagcagaggaactcttcaagcaatatatctcttcataacctaactgttgcacttaatttgacaattcaggtagattaataaatgaagaaattaaggatttagtatcattttctgtgtcgatttgttctatactgttcattgcgcaggatctcctttactttttaggtcgacacttaaagtataacgcagagagatcctgcgtttttatttttgataagaaaaagccaagaggcgcggggaaggagcgttaatcttagctttcaagtttcagaaataattttaaaagcagttaaaaagcacctctgagttatcagacgtgctcgttatcttttcgatttatctagttgattggcgccgaatcagcttcggtttaagcattacttcaccttgaggtgaacctgattgggcaatcttttgcagtagcattttagctaacatttcacccatttcaaaaattggttgtttaattgtcgttagctttggattagaaacttgatctaaaaagacaccatcaaaaccaataactccaaagtcttccggaattcgagcgccttcatcttgcaattgccgtacaacacccactgcaattcgatcactggcacagacgaaacaagtatcttttttaaattccttaaaatgttcatgaatcacatcttgcgcagcatgactatgattagaaacccgaaaaatttgtggtatcaactggtgttgttgcaaagtgttgatataaccagcttcacgtgaatattcaaatggctcttttaaatcaattccaataaagataatgtgcttatataaccggtctaaagcatattgagtagccatcttctctgctaactgattatcagaatcaacaaagtcatagccgcggtgattttcaccaaataaaacaaaaggcttatcgagtttatcaaataattcataatctttgtttcgcgccccggtaattaaatagccatctgcatgttccttttcaatttgattaggatccgtaactaattgcatcgcatactgcttagtatttaaaccacgagcaaaaccaaaaagcaagttcatatagtatggctcagtggtatcaatatcttctaaagtgacgaattttaccacgttagtccgattattaactaaagcctgtgcaattgaattgggatggtagtttagtttctccattgctttttctaccattgctcttaattctggcgttacttgctcaggatgattaatcactcttgataccgtcatttttgatacatttgcttctttagcaacatctgataaagtagtcatattattcctcttctaagtacatctttctgaatcggtttaaatctttttggctaaagccaagctcttttttgaaaaatccatcaaaactgccccagccttggcgaatagtttccgtaattccacgaatagccggtccctctcccttggtaatattcattttagaaactaggctagcaatttcattatcatcggggaactgtttagccaaagcaaagtcatacaattcattggtcaatacgcgtggtgctagttaaatctttctagacaataagccaaattataagctaaaattgcaatttccaaccggctttgaaagcctatcagactacgtgctcgattgttctcggcattataataggtcagaagcgaaaagtcgctttcaattgttctgcgaatagccatcaattgatgatcattgtgctttttagctcctgtcatatttttacgatatggtgtccaaagttcataacccatttgttttagctgttgatgcagttctttgcctaaatagccttcgtcgccaagaagatagtaattagatggatgggcattttccagcagttcaactgtctccttggcatcatgaactgatgcttttgttacgacataatcaagaatggaaccgtcatcgctaacaatggcatgaactttgaaaccatagaagtaaattttcttggtggccttataaccaatgttggcataaccgcgaaaaattttagcacgatagttgcgaattggttggcaaacaggtaccggaaagctgtcaatgatcaagaaatgtccattcaggtcaacctttttattcatttcttgccgtatctgataaatcaattgcaatagctgacgtgaacgccgattaaaacgtgagtgtgataaacaattgaaacattcacagaatcttctttgtgattcaattcctgtcttagcttgccagataagtaaagccaaaatcagactgtccgtagttttaatttgatcaatatttcgccgatgagtaaactcagccggtgcatacaaacgataccagtgccgacaaattatcactaaatctttaaaactaacttgtaaatggtggctaaaacgcttaagcttaaggcagttcaatcagatcagactcttttctattattactatttacaagtcgagtctaacaagattggacttttttattaactaaaacgatttaactagcaccatgcgtattggtcaataaataatcacgcgaaatggtgtcatcatcaacacctaatgcggtcaaaattaacgccgaagtcatgcctgttctatctttgcccgcactacaatgataaactaacgcatcttcttcaggtaattcaatcaattccgcaaaaattttagcaaattcatgttggctatgtgaattaagcaaaacctgttggtaaatttgaccaagccaattgtcacccatatcaggaatatgatggacaaagcgatataacttgttatcgcctttattttgcttgcggttttcagaataaatatgtgcatcaacaaaacggacatttgaccaaagcttgtcaggcgctgaattttgttcatatttagagcgtaaatcaacatctacggtaattcggcgttcaactaacttttcttgatcttccttcgacaaggagctaagtgaatcagaacgatatattttgttccactttacatgttgacccttgtcattttggtagccgccgatgtctctgaaattcagcggtccatccaaagctaatattcgatcatgcttcatttttccttgcctttcctcattaaagtgttaataccgtacttttattatatcattatcagtcatgtgcaaataaccgagcggcacgaattgctctttgccaacctgaataaagtttttcacgttcaactgcactcattttcggctcaaaggcctgtccaatcgtaaaggtatgctttaactcgtcaatatttttccaatagccaacggcaaggccagctaaaaaggctgcacccatgctggttgtttccagcgttttagcgcgttcaatttcaatccctaaaatgtcagcctgaaactgcatcaggtaattgttgttgctagcaccgccatcaacacgtaaagcaggaatttcaatgcctgaatcttgttgcatcgtatcaacaacgtcacgggtttgataagctaatgactgcaaagttgctttaattatatccttgtcagtagttccacgtgtaacaccgaagattgaaccacgagtctccgcatcccaatatggtgcgcctaacccagtgaaggcagggacaacgtaaacctcgttctctgatgtcgactcaagcgctgcttgttcagagtctggcgcatgcttaatcaacttcatcgaatcgcgtagccattgaattgcactaccagccacaaagattgatccttctaaagcataagtaatcttaccattaatgccataaccaatggtcgttaacagattattgttagagtctgttggcttgtcccctgtgttcatcacaataaaggcaccggtgccatatgtgtttttcaccattcctggtttcaaagctagttgaccaaataaggctgcctgttggtcaccggccatcccagcaattggcacttgtccaccaaagaacatatatgacgctgtttcaccataaatctctgaattcgagcgcacctcaggcaacatttgcttaggaatattgagcaaatgcaaaatatcgtcatcccacttgagcgtgtgaatattaaacagcatggtccgtgaagcattagtgtaatcagtcacgtgtttagcaccatcagttaacttccaaactagccaactatcaatcgtgccaaaaagcaactttccctgttcagctttttcttgcgcgccaggtacatgatcaagaatccagcgaatcttagttgcactgaagtatgggtcaataattaagcctgttttttgacgaatttcattactatagccttctttttttaatttttcagctaattctgttgtctgccgtgactgccaaactattgcatgataaattggctcacctgtatccttgtcccaaacaacggtcgtttcacgttggttggtaatgccaattgcggcaatttgattaggccaaatgcccgaattaataaaagcattggcaattgttgtttggaccgccatccagattttattagcgtcatgttcaacccagccaggctctgggaaatattggtgaaattctttttgggcagaagcaacttcacgtccatcatggtcaaaaataattgctctagtagaggtggttccttcatcgattgctaaaatatatttttctgtcacagttattctcttttctacaaaagcgctttcttataatattactgtttttctgatgcagattctagcagttaatgtaatagatacggtataatttttataaggattttttaaggagggcattttaatggaaaaaaatcaaaaaattgcggtaacaattgcgggtaacgatagcgacggcagcgcaggcatgccagcggatctgcattcattctacgcccgcggtgtttatggcatggggctgatgacagccgctgttgctggcaataccaaaggaatttttgcccaacaaattatgtcacttgattttattcaaaagcaatttgatgtactaaacgatgatttcaagattaatgcgactaagacggggatgctcgccaacaaagaaattatcgactgtgttgccgataatcttaaaaaatatgacatgggtaaaatcgtgctggatccggtcatcgttactaagcatggcgctaccctgcttgacgacgatgcttatcaaactttcttagacaaattattgccgctagctgatgtgattacgcctaacttttacgaacaaaaaaaactgaccggcttagaattaaataataaagaagaaattcacgccggggctaaaaaattgcaagcgatgggcgctaaaaatgttctgatgaaagggcgccacgattcagatacgcaaactacagtaaccgatatcttgttaactgaggacggtgaattccacgaatttactaagccattctttaaaaccgaccgcgtaaacggcactggtgatactttatccgccgtgattgcggcagaattagccaagggcaagtcagtgattgacgctgtaaaaattggtaaggactttacctatgacgctatttctcacccaattgatgttggctcaaaatggggcccaattaatcatttggctgcacaagaagaaaacgaataactataaaaaataccgaagctcagatttgaaacttcggtattttcgtgtctattttatcttctttaggcctactatttttcctgaatctagaacacttaccttcgttaattggttattattgtacttatatgatgtaccttcatccgaaagacgtcttgtgggtggtcatttgaccactctttttttacgcaaaaaaacagcaatgaaatcaatcattgctgctaatttgtttactttttctcaattacaaaataatatcctgctgtcaaaatttggacaattccttcaagtgcaatcgcccaatctgcaccgaaatgcgctacgatcagtccacctaaaaatgacccaatcggaatcatcgacgacaaaatagaatcgttaattgtttctactctacctaaaatatgtgggctaaaactctcttgcaccaacacttcaaagttaatattcatcatcacgatccataattcggacgtaaaaaacaaaatcaacaataaaagcggcatccctttgggaacaactggttcaaggacaattgctaaacctgataacgtgagacaaatgacgactaacctttcaattttgcttttatcaaaagttagtcgctgtaccagtacactgccaactaatccacctattgatgaagctaattctaagccaccataactaattgccgatttagtcaaatgttcagtcgcaaaatacggcaaacccacagatgaaatgccgtaaaaaagattagtcactgcaaaaggcatgatcaaccgtgctatcttgtcttcttgtttcaaattttgccagcctttaagcaaatcttgcccataattttctgtgaaatattcattcgacttatttggaagtaataatttcctaggcaatattagtcgtgtataaaaagctagggcgcttgcaaaaaatattgcagaaataattaccgtggagtcaaatgacatccaagtaatcaataacgttgccgctgcattcaaaaacaaatccagcgtcttataagtcatttggaaaacgccatttactttagttagcttcgcttttgaaacgatgactggcaaaattttttcttcagcaggataaatcaaagttgagccaatcgttgaaatgacgtatacccctagcaaaagccaaatcactaaatcgcgccacaacttaacttgaaacagcaacgtcgctataacgctggtcactatctgcattagagttacaagcgtaagcatctttttgatataaacacgatcaatcagcggcccgaagacgaacgacaacatttcaattgatgagtctgcaacaaagattaacgacaagataagcggcgaatgaaagcgtaccttgaaaaaccacaaaatcgccatataaaatagcgaatcggcgatattggttaacactcgtcctgctaataatcgtctgacattgacattttctttttcgattaagttaaacattttcccattccttttcacaacactattaatgccgctgaaagccagggaaaattactattcaattgtagttaaaactcccagaccttcagctaaaaatctgggttgagcctcaagtagcgtttgacgaatgaaagaaaataattcattcgcaaacttaaacctaaaatgtcacgcattttagtcctcgctttctgtgaaaattaagttaattatagcatggatagcgacttatcaataatagtcattctatccttatatttttcgtattttcattcaatttcaaatcatgacttatgataataaccaaattaacttgcgctatttcctgcaatagttttaatagatcactttgtaactcaggatagatatttgccaacggttcatctagtaaaaaacattgcgcgccagtttttaaaacagcagaatataactttactaactgtatttcacctgttgatagttcatttatctttctatctaaaatcttttcaattctaaattgtggcgaatcaaaaacttttgcaaaatacttgcttttataaacctgacttttatcagaatatgatcctaaatagtccctcactgaacaattaggaagtggtatatcttgaaataaacaacttatatttgattctctcagttttcttttattaattaaatcagcatctataccatttatggttatttttccttcctttttcggcgtgtataggccaattattgttctgagcaaagtagattttccaattccatttctgcccctcacaatataaaatcctggagtaacaaaattggcagaaaaatttgaggtgaataagggggttttttcatctaaataaatattaaaatcctgtacttgaatcaaatttattttagaaattatttttttaccatcttgttcattcttcatggttagtaaattgttgattctcatccacgctactttaaacgattcaaatttaaataagatagaaaaaatttcatcaacctgtcccaaaagttgattaaaatattgaaaaataattgaaaaggaaccgattgtcatcttgccggaaatcactgataaaccgccattaataaacaatactaattgaaaaataagttgcaaaacaatctcgctattagacatatgtcaactaccctagactgaagtctagggcttagtggctcgttagcttgcgctaaccagaacaccaacttgcttagatacggacttgacttaccagcaatagtcttttgactattgccgatagaggtcgtctaattaccaaagccttttgagtccgcgagttgctaacggactacagcctttctaggctgctttttttattttaggattctgccacttgactaatcctttttctaagatgttcactgccgcattccaatcacgaatatggtgcgttcaacagattggacaagtccattcccgatctttaagcgttagtttcttataaccgttttgtcccataatactgccacaagcatgacagcgttgagtagtatatttaggatcaattgttagaaattctttgtcatatagatctgccttataagccagcatgttcaggaagctgcgccaaccaacatcagaaatagcttgagataaggcatgattctttaacaggtttctgcttcttagttcctcggtaactactaaatcgtggtttttgattagtgcagttgagagtacttgtaaaaagtcactacgctgtcttctaatcttgtcgtgcagtttagcaactattagacgctgtttttgatagttttttgctagccgcaaattgcgtccttcttttttagcccggcgctgccggcgagacaagacacgttgagcgtgagccagtttcttttgggttttgcggtaaaagcgtggattagcgaccattgatccgttagatgctgtcaagaaattatcaaggttgagatctattccaatttgactctgcgtcttaggcaaggctttaacaaaggcaatatcgctgcctaactgcattgataagtagaactgctcgtcagcggtctttttaatcgtgactgttccaatacgagttggaatatgattaagcaagcgctctttgattagttttctaaagccggcaatgcggacaattcccagcttaggcagtttaacgtgctgagcatcaataaacctagctgtcccgttatcaagaaaagcttctttttgcttaggatattgacagttggtctgatatgaccagtcgctgcgttttttatggaaagttgggattccatgaccaatcttacgatagttgttccaagctttctgatagttttgaatcgcattggcaagagcgagactatcaatttctttaacacgtaaaaagctataagcatcgcggatattcttaggcttagctaataacgagttattaatgactacttcttctgccagcttagtctcataattattaagaatagaaaagacaaaaggcattgcttgatattgtctaacagctaaatagtgcttagcatgataattgcttcgattgcgtcctacataagagttgtatacaaagcgttgcgcatcatagtttagtttaatgattttcttttgcttagaactaggataaaagcgaagcttaacgccaaagtgataggctaaactgctcattcttttcatgtgtttcacctccttctgtagattagatatttatattttacaggaaagccgaacatatgtctctatttttttgaataaaaaaagctgactgctaggtcagcttggccctatccatccccgcattaagatacggggatttccgggcattttcattaaattgagaagaaaatctcgcttagcaacgcctaaaagcgttcttttagtattgctccatctctcagtttcgattttctctcttcgattaccttttatttcaatatatctgcttaaccattcagtaaaaccagaaaagtactcattataagcttctttcaattttaaactaacttcaaaaatcttagatcgcaaaaataaatatatgagactatatgcaggtaacaggatcgctattaacaataaaaaaccagacccagccataaataaatatgtaaaaatcaaaattgaagaaagggcgattgaaataatttgatttattgtttggaataaaaaagtcaacacttcagtagtatcttcagtaattttatctgctgtttgaaccgaattcatctttgtaactgctagcgtatccttcacatacagttctttcattattacatcattaacttccatgtttatttctctaaatcttaaaatctgaattttgttcataaaatatgacaacaaaagtctgataagacttaaagtcgttattaatacaatactacgtacaaaagcagccctatcagccttatatactaaggaatttaacagtattccttctaagtaaacattaaaagtcaaaatgccagtactgataatattcattcctaatagaagccaatattcaattttatactttttatcaattttgctaaaaatcgtatgcatagtgtcacctaactctgactagcagtcaaaaatgttaaaatataatgaatataaaattagataaattttatattcttatttatcctatgtcaatactaaataaattgatttggttttactttcatgctgtatttgatattatgtagttactaactaccaaataactatctatcaactacagaaagagaaaaatatgactgaaaaagcagcaattaacatccgtgttaataaagaaactaagcaaaacgcagagaaagtattaaacaaactaggcatcccgatgtcagtcgcaattgatatgtacttacgacaaattgcattgactgacggcattccctttgatctatcttccaagaaaagaaaaaagaaaaatgatcacgaaacagcaatgatggtcgcagaagctacagctcaatatgaaatcgttaaatccaactgggaggataaattagctgagtttattcctgactggatgaacatgaataagatgactaaagaggagcttgaagcaaggttagctaagcatgcccaagatgcaagagatggtaaaagtgtcgagattagcaaaacttttagcgacctgaataaagaattaggaatttaaatttcatacaagaatatactgtcaaatcaagtcctaacgtatctgtagaacttaaagagatatatagctctatcttgcaattatctcgatctccaaaaactgctcgagattatgtaaaagatcttgaacaaactatgcaagcgttaaattattttccagaaagatatagaaaaactccttcaggaaaataccgacgagttaatttcaaaaaatacgctatattctactttatcgaaaacgatactgtacacattattgatgtcatactagcttcatcaagtacagtattcaaatattaatcctttgccccattctagctattaagctatactagacagaagaaattaaacaaattaagggacaataaaatgagcgataaattaattaaaattgcatacctctacgaagatttaatgaatacttacggtgactcaggcgatgttaaaatcttgagctttttgctaaagcgtgaaggctacgacactcaagtcgacaatatttcacttggcgatgacttcaatgcctttgactatgatttcgtcttcttcggcggtggtcaagactttgaacaaaccgttgtagccaaggatttaccacggcacaaagaaacacttgataaatacatcaacgatgacaaacctatgctctgcatttgtggtggttaccaactaatgggtagttactataagaccaactcaggtgtaacaattcctggcttagacattttgccacttcacactgtcttcaagagcgacaagcgaatgattggtgatacccgttacatgaccgaatggggcgaagttaaggcttttgaaaaccactctggtcaaacttacttcgacaacaaggacaagttgcatcccctcggcgacatgatcgaaggctacggcaacaacccacaagaccacgtcgaaggcctgcgctatcgcaactttattggttcatactcacatggtccactacttaaaaatactaatgtagctaatgccatcatgaaaatgattatcgcttggcaccaagaacgtgttagcgaagccgaaaaagtcacagaataaaaaagacccagtcagaatctctgactgggatttttcattatcaaattaatttaaaacacgtttagcagctgagggataaaagtaggcactgatagcctgctttctcaccccttgactaggagttgcagcgtgaacatattgtccatcaccaacataaataccaacatggtaaggagctgaggcagaaccccagaacaacaagtcgccttttttaagatgacttaatgatacgcgtttacctttagtaacttgaccataggtggttctaggtagtgtctttttagcagcctttttataaacgtattgagctaagcctgaacagtcaaaggctgaaggaccagtagccccataaacgtaactcttaccaacttgttctttagcaagttggactacggcgttacgtttttctgttttgctttgactagctgcttggacagtttgcgtttgaagtggaacattaatgaatgaaattcctgtaaaaaatactgacaaaactgtggcaaacttaactaaactacgtttaaaactcaatttatttctccttaacacttcttatctttcaatgttttctatattaccggagaaatattacagccttgttttaaaatgactactataaaattaagcaatgtaacaaaatctgctatttcttgtaaattttgcttaacttgaaaaacactataattttctatatgcttaatacattaatttaggagttttttattatgaataagatagatagttatgtacgccactttttaatactaatcgcactaattttagggctttcactcgtctcagaactgcgtgaaattattgcctatgactcatctacccttggtatcatctttttaactgctgcaattatttgtacttttgcttcaggaatcacattacaatttcataaactaaattggattacgatcattttaattctgattctttctacgattatgatcttattctggctcaaaacccacacttttggccttattgtcagcatttttatgatttacaatattattgtatttctggtttgtgctattaacctaatttttcaaaatgatgctgaatgattaaatcatatgcttaatcataggtaatacaatcccaattaccactaatccaccattaaacaaaaaacttattaatttcttttcaaaaaagtatttcttcataaaaaaagacctttctattatgaataatcaaatcttcgggctaaaattccgacaattacgaaaacaacaacatatcactttagccaaagcagcagctggtataacttcaagacagtctctaggtaactgggagactggcaaaggcgaattagcatttgagaaagttttactgctactaaaaaaaatcaacgtccagccaatagactttttagagagtagtataagtagttacctcaaacaaactacttcacaaatctctgcagcttatgttaacaaccaagttgataaattattgcattatgctaataagtatcttgacataagccatcgtaatcttacagacagagttagctttttacgagctgctgtggcatgcaattattacatggacctaacgagtatagatctaacaactagttctgataaactacggatcatctcccattttaataaaatcttgaatggagaagaaatctggaattttgaggatatttattttttaggaaatacacaaaatctgatgagtccacgtgacatttatagtttagcctattctttaaattattatcgtcaaaagcacaaaaacgataatagagaatggatcaatgccgtttataatactttgataaacgctgaatttgtacttataaaaacaaatattaaattggctactgatttagacttacttttaagacaaaagtgggatttaccagataattatgctttcgaaaaaattcgacaaaattttatgcatgaactgctaaaatatatttcaacccaagatgaaagtgcaataactcagcaacttcacattcttgaattagaacacctatctgatttaaaaactggttttgaaacagcatatgaacaagtaaataaaatatattttcaataaactctcctcctagttagtaatattatcttatttctaatattgttagcgctttttgccaatattttagcatttttctttttacaaatattagccatgatattttatattcgtaaactaattaagattttttgaggaggatataaagatgaaaaaatcaattaaattagttaatgtactttctgttagtgtactgactttaggacttgtagcacctgtaaccacagtttctgctgatactgctaattctgagaatatcgcagtaaaaacaaacaatgaatcaacacaaagtacagatacatctggcttagaaatctatgatcaatacgttcaagtaaatcctgaaaaaaatcaattcgaattatccaaattaggtgaaaaggttttaccaactactgtatcatcacagattcagagtcaattaaatgctaccaataaagaaattaaggctaataattttattattgaccctgaaaccaaagcaattgtaaaatactcaccttatattaactttgctgctagcgttagtggcgctgcgcgcttaagaagcggatgttatgttcgatggttctggtggggctttagattctactttacttcaaatgcagcagtaacttggtttagagggattttaggtggcgcttctagtggagccaccataggaaacttagtagctgctgcaacgggccatgctatggctgcaactacaatagaagcatttggtatgtacgctgatagtatgtctagagatttgtatgattataataaaaaacaccgtcgtagtaaagtatatatggatctgaatggtgtatttcaatattcatttcatacattctaaaacatttggagaaataacatggggattaaaactttagtatccgtcattttaatcattatagtcattgtactagcctgctcaccattttataaaaaatatcaattattctatttaaacaaagtaggctattgggatatcctaatccaattcctagtaattgcaggtatcaacttcttcatcggtttaaaatatggtctgggtgccctgtttttattgattgttcccgttccactagacattattttcttaatctcaatgatttattcttaccttaaaattagaaaaatgaaacgcaaatagctcttaaaaaacgaagcaaattattgcttcgttttttgattgatcttatttttcttctgtttcggcgttagattcaaagccatcgcagccacgacaaccaacactgatccgacccaatccatcggcatcattactaacccaaagaaaaggacagaaccaactgtagctgaaaatggttcaaaagcatctaataaacttacagttgatggaattacataccgcagcgcgtttgccataatttgaaatggaataatcgttccaattacaataactgccgcagtatacagccaaacttcaggcttattgggaactgcatgaaattgcggatcaattatcaacaaactgattccagcaaaaatcatcccccaacctgttactaccatactagaaacctttttaacaatgttaaccggaatcaaagtataagcagcctcaccaaaagcagacaaaacgccccaaaacagtgcaactggcgtaatggccaaatgattaaattgcccatgcgttgacaataaaaacactcctaaaaaagcacataacgccgctatgatatccaatctacgcataacttgcttgtgcgtgatagctaaatatcccaatacaaaaaatggcccaataaattgcaagattgtcgcaatcgaagcattagccacttgaatacacataaaataaaatagctgcactggcaataatccaaatatgccataggctataataaccaaaacattgtgcttatttttcaacgtagctattggtttttgctttaaaaatcctgaggcaattaataaaactgctcctgaaataatcaaccgaatttgtgttaaccacattggtgtaatcttcggactaatatcaaacaatcctttagcgaataatcctgacacaccccacattacagctgccattgctgctagaaatgtccacaatcttcgtgtttttgctggtaccatctcgttcacctttttctttctcattcacctaataattaaaccacaaaaataaggatacctactgggcatcctcaactttattgatgagtttttttaactttctttttcttaggtgaaatattcaaggccatagctgccagcacaactaaaatcgaaccaatccagtccattggggtcatcaccaaaccaaagcaaataactgaaccaacggttgcagaaaaaggctcaaaagcatctagcaaacttgccgttgatgccttgataaagcgcagcgaattagtcatcaattggaatggaatcagggttccaatcacaatcactgccaccacatctagccatatatgtggcgtattcggaatatgcggcatctgtgggtgcacaatcattaggcaaattcccgctgacagcaatccccaacctgtaacgactaaactagaaactcgcttcaacacactgattggaattaatgtattggtcgcaactccaacagctgaaagcaaaccccagaatagaacgctaggcgttaaagcaaagtgattaaaacgcccatgtgtcgccagcaatactacgccaataaaggcacagatggcagcaagcacatctattcgccgcattacttgcttatgcgttacagctaggtagcccattacaaaaaagggaccaacaaattgtaaaatcgtggcaatcgaagcattagcttgttgtactacaataaagtaaaacaattggactggtaataaaccaaaaatcccatatgcgataatcgtccacgcgtcatgcttatttttcattgtagcgattggcttttgctttaatacggcagctacaattaacaaaataatgcctgaagttaccattctaatctgtgatagccacattggtgtaatctcaggactagtattaaatagactcttagcaaatagacctgatattccccacattacgcaagctaatccagctaaaaaggcccacaggcgccgttgtttttgtgtaaccattctttttaatccccaacttttctaaaactaacatactctatcataacaaaaacgggctagcttgaactagtccgttaattttttattcatcgtttttcttaattgggtttctgctaggcattagctgcatgaatgtagcaacaataattaaaaagccaccaagcatgtccattgggccaaagtccgcatgaagcagtgaaactgacaggatcgttgcaatcagtggctcgagggctccaagcatccctaccgtacttggttcaatatactgcacactagataagtacattgtataagctaacaatgttccaccaataataatataaacaattacccaaacatcaactggtgcaagttttggcattggttgagtgaagtaaattggtaaaaaggcaatgcctgcaaccaacattgctgcgccgattactggaatcggcccatactttttgaataatttcccaggtaatactgtattaatcgcttcagaaaaagccgcaattaagccccagaaacaagcaagcggtgataaagcaagttgatcgaatctgccacctgtagccaagatgaaggttcccacaactgctaccacaattgaaatcgcatcaattcttcgtggccacatcttacttctcaatgaagaatatataattatgaaaactggcgctaaaaattgaatcaccgtcgctgtcggagcattgctgtacttgactgctacaaagtacgataattgtgagctccccattcctaagaaagcaaaaatgatcaacataatgattacttttttatcatgtagcattgccttgacttggtccaagtatttccaacaagcataaatcataagcagggcgcctgaaaaaagcaaacgcagacctacaagccaagcagtatttacattagtgctagaaaataaaaattcaaccgccgtacccgatgcaccccaaaaacaggcaccgacaacagctaaagtcaatcctttataacgctgattcacattcacacatcctttagattaatgtttttcattgtaacatgggctaaaggaaaagttcaatgcttctaaagttgatttaatctatataacgtataacctgacacgctagccaataagccgattgtaaaaagcaaccaagattctggatgaaaggcaattaaaacaagtgaaagaaagcctgctgctaaactagaattgcgttccattcgctttttgccaaaaagcagaccgcacataatgccaaacatagttagcacataaaatgagtcaactaacagtaacaaattctcaataattgctagatcacttggctttacttttacactcaaatcagtaaaaatctgagcacagccaaaaaataccatcacaaatgcagctaagatcgtgataaagctaatcgtacgaaaaactgacttcaccttttgagttggcgtttcatcgataaaggtttttaagaaaaactcgtgatctttttttgctactacagctctgcccgtcttcttgtcataccagttcaatagaccagaaccaattagcataatagcaatcacagcaaactggatgacaattaaacgcatgaaaattggaaaggcatagattaccgtcaataacaaaattactatatagatcagctctgcataaagaaagaaatgcagacgctgtttatttttgaaaatagtttggaatgtttttgaattaggatcttgcataagacttctccccactaaatcttattacgaaaactcaaccagaaatttgccccactgagaatcaagccaataacagtggctacttgcatgcttggctgcatgaaaagcaagatcagtgataaaacaacagttaaaacgctagacgcacgaattaatttacgatttccacctaaaataccgacctccacacaaaagagtaaaacaacatataggccatcaccaatcagccaaacattttcaaagagattggcaaaattaccggtaagcggcttagccaaaatgtcagtccaaagctgacgtgcaaaagcaatacttaaaccgatatttgcccaaaagagcaagaattcaaataagcgaagaaatacgtttttagtaaatctaatactagtcagtgtttcccagaatgtatcgtgttttttaatcactatccttcgatcaagaaaggcaccaattgaataataaatcagaattgcaatcccttgaaatgcaatcaaatgcataaaaactttaaagtcaaacatcaatgtgaatagtaaaactactacataagctaactcaaaatataatacacagcgactaaactttcgctcgctaagccagtgcttcaattctcttttattcatatgatcactaatattgccattcatattttcactctcttttaataattatctaattatgtaaaaattgtataatgatttcaaaattttgtctagtccttttataattgatttagtaaatatttttcgaggtaaattatgaattatcccattttaattactattttgatcttcttgctgtgctttggccgattcatttggatcattactcacgaacgtcgttccttacgcgctggagttagcttagttatcaccttatttagttttttatttttaggtgtagtcattctggttaatatcgctgaccttgatccacattacaaagactggattttgccattatttgtgattgcgctatttgctgtgatggctggaacgattatctttgcattaactttgatcattatgtttttctacgatggcattaaaatcattatcaaagaaggaaaccgctggacaaattatctttctctgggcatggggatttccattatcttcttcctatttttatatcctcttgtgggacgaattagtcatgatagctggttaaagtatccttatatttttctatggctagtcatcatctacttagtcactatcatgatgatgtatactttaacttcttggattaatttaattaattggcacatgccgcacttagactacatcgtagtgttaggcgctggcattatgggaacaaaggtaacaccacttctggcagcaagaatttcccggggaatagaaatttatcacaaaaatcctggctctaagttaatcatgtctggtggccaaggacctggtgaagacattcctgaagcagttgctatggctgaatatgctgaaaaactgggtattaataaaaacgatattattatcgaaaataaatccaaaactacccagcagaacttgcaattctcacatgcactgatgaaaccaaatagtcgcttctgtattgtaaccagctcctaccacgtgtatcgcgctctggttttagctaaacgtcaaggactcaagtgtactggttatggtgccaaaactaagtggtattttactttaaatgcttttgtgcgtgaattcattgcatatctggtaattactaagaaaatgcaattgactatcatcggttttctagcagctatcatgattgctgctgccgcatttcatttttaatttattgcgttaagttgagaaacttagcgttttttattgatttatcttttaatttttttataattatagtcaaatctatagaaagcaaggtgtaactatgaggattcgtaaaaacaacttgtcaaactgtcattagtcaggatgacgagtcctgactttttcaaaaaagcaggttacttatgtcagaaacaaaattcaataaaactcttcttagtgtcagtcatgtggatttttcctaccctaagcgcaatttattcaccgatctaaatttttctattgctaatggtgaacgtgttgctctagttgggcctaatggaattggtaaatctacactaattgacctaattcgtaagcaaatccaaccagatgatggacagattatttgtcacggtgaaattaattatgtacctcaagtcaatgatcaaactgtaattaatgactcaaagagcgctggtgaaaagcgattagctttaattgaaaatactatttggcttcctagttctcttctcttattggacgagccgacagtttacttagatgacacaaatatccagaatttactctacttactcaagaattatgatggagcaattctagtagctagccatgatctggattttatcaaccaactatgtgagagaactattattctgcagccaaataatgcagtttattacccaggaaattacgcacagtatctcgaacaaaaacaattagataaacaagccgtatacaattttaacgaaaagcgagatatattaaagcaacaaattactgaaaaagtctctactttaaagcaaaaaagtactgactataatcattttgctaaaacacaagacaatactggtcgctatccttcgcgaagccatgatcatgtccaaaaaggattaaatagtcggcttaagcgagctgaacgtgaactggctaaacttccagagaaacagcacctatatcaacatcaacttaaacttcctgaatttaaaaagtggccgactaaaatacataattactctatcaaaatagatcaattactcagtccccaaaataagactttattatctaatacacagttaaacttgcaaacagccgatattattggattaatcggccccaacggctgcggtaaaacaacattgctcaaatatttagaacactacattaatcagcagcaatctttgccaccagccagctacattggtttaaatacgactaaacaaaagaaacctgccacagtagcagatttctttcacgagactattttgagcaaaactgaagttaagcgtcttttagttaaaatggatatgtttgtcgatttgactacaagactcacggatttgagtggtggcgaatttgctaaattagcattaatcaagcagctataccttgaacaagaatctattctattacttgatgagccgactaactatcttgatccagaaagtgtgacggccttggcccaaatgctaaaacagtcgcatctcacttgtattattgcatcccacaattgcaaatttttaacccaattttgccaacaaatctataaaattaagcagcaaagactaattgaattgcactaaagcatttctcttaaacacatatttgctaagcatatcctttactatcctcatctatattaatgaagatcacatttggtgctgcagaagtttggtgcgtttctttattatatttaccaccataatactcataacgaggtttccccttgccaaaaggatctattcggcaaagaaagatcacatatgtcgctttgaattctttttccggagagccacctagcccgccatagattatttcttcctgataagcgttggcaacttccagaatgttttctcctggttcttgcgaccctacttgaatgattaacccgtatttattgcgcctcttgtctcgcgcaattacatgtacgattgctttttcatctaagacatttctatttggatcatcaagtgattttgcttcctgaatattgagttcgggaagcattctttgtactgctgtaagaagctgctcattatacttcttcataattcctgcggccatgtgatccaccattgccggtgacatttcattttctaacataaaaaaatcctcatttctaaaaatctgagagttttatccctctattacttattacgcaaaaaaacgcaaaaattttttcggaaatgaagttttttcaattttttagttttcttttctaaaaaatggactgagtagcgatacaagcaggccgtaaataaaataccagcgataaatatctgccaagtcttgattttgaatccacaaaattattgcaattactgtcagtaagccacctaaaaagattgttgaacccatatttttatcagtaaagaagctgatagcagcacctaaggtaattaacgctaccaaactataaatgacgataatcactggtcctttagtctgaacgttaacatcaagcattggtgcgttagtaaacagctgccacacgataaaaccagctaatgcaatgccacatagcaatactagtaatctaaaaacaaaagttaaagtctttttcattatttttctcctgtatgcataataatactagtataacagcaatatcgcggcatacgaaaaacgcttggatttttccaaacgcttttttactattcttttgcttgcataaattgttttctagtgatgtatttgattgatttaacgtattgccccttgtgttgaattgaaatatattggcctgatggatcgtagccgccaacctttttcaacaataaattctttttcgtcttaggattatacgccttcacattgtaataccgctgtgtgcctttatctacttgagcatagcttgtttcctgggaaatgaatggattcaatctatcagtaaaagagttatgaaatgaaaaaatgcagattactcccactactagcactagtgccgttacaaatgcggttttaatagtacttttattcataatattcaccttcatcgttcaactattgttatactaaaatagtacaccaattcagttactttaacaattgtttctagcaaaaaaacgcttgaaaaattccaagcgtctttcacctaagccaaaaatctttttatagcttcttctacactagcattcaatgattggtgcttcgttgcagcataattagccaatttttcatgtaatgaaggatcaatgcgcacattaaaattacctttaaaaggtttctctggtataactccatcttccttacagctcattagataatcatcaatggctccttgaaaatccttctccaattcatctattgtattaccttcgtaagaaataagactcttaatcccctgaaccttaccaaaaagaatcttatcctccaaagtatattcaattgaaccttcataacctttatacttcatatattgattagtttttttcatctttattcatctctttgattttatcttgaatttgtttgatttgatatggtaatagttcttttctaggatgtggtttatgaagaatgatccgatcactgccctttttaaaaataattctagatccactcgtttttcctttattatcgagttgataatctagttcatgcaatagtgttttagcatctttaaagtcaaacgttctgagactgtaaaatagtttgtgtaaggatgaatgattccttaaatttatttctttaaacattagaaaaaggagttcctttctcgtatgattggtttgaacaaaaaaaacacatacagaaagaagaactccttcatgaatgattttaccaaagattttgctcaagctctattcaatccagacaaaataaatgatttattgcgcaaagaactacaacaggctgttaataacttgctagaagctgaattgactgcctttctgggctatgatccctatgccagaaatggctggaatactggcaactctagaaatggtgcttatttccgcaaagttgatacgcaatttggcccaattgaagtgcaagtgcctcgggatcgcaacggtcaatttcatcagcacacgctgcctgactacaagcagcactcggatatcttggaaagcatgattatcaagctttactccaagggcgtgaccaccagggaaatagccgatctaattgaaaagatgtatggcagccattacagtccagctcaggtatcaaatatttccaagcagatgattccaaaggttgaggcttaccacaaacgcaagctaagcgacaagtttttctgcgtctatttggatgcgacataccttcctttgcgccgagaaacatttgagcgtgaagcagtctatattgccattggcatcaagcctaatgggcacaaggaggtcattgactactgcattgcgcctagcgagaacattgaagtctggacagatatgcttcaaaacatgaaatcccgaggcttaaagcaagttgagctttttctttctgatggtgttgttggcatgaaaacagccttagctcagacttatccaaaagctcattttcaacgctgtttggttcatgtcatgcgcaatatctgcgctaaagtacgcgtcgacgatcgtgaaaagatcatgaacgaattcaaacaggtgcatcaacagacaaacaaagaagaagccacagctgtcctgcatgacttctataccaaatggggcaaggtttacagccatgttatcagaagcttgaaagacatagaaccagatctgctggtcttttataactatcccaagcagatcagagcttcaatttattcgactaacatgattgaatcatttaacaatgtgatcaagcgcaaagctaagcctaaggcagagtttccaactgaacagtcgcttgatgcatttattggcatccaggcaatgagctacaatgaccgttatttcaatcgaattcataaaggctttggtcaggttcaggacaccttagaatcctactttgattaaataaataattaaaaaatcaatttacgagaaagaactatttacacaaaagatttgacagtttcaacgttcttggatgactatataactttattaatagcttttctaatttactcacgttatcctcacttaagtatataatataatatatcatttgtaactaaatttgcaactaagacaaattatacctaattcgctaaattcacgctactaaaaaagcgcttggaaaattccaaacgcttcttttgtttaatcatctagacctaacttcttaaagatatcatcaacatgacgcaaatgatagtgataatcaaatgcatcatcaatatcttccttggataggtaattcataatttcactgttttcaaccaatggcttaaactgcttttgctcattccatgatttagcagttagcttctgtaccatatcataagctttttcacgagatagacctgcttcatcgatcaacttaagcaacactcgttgagagtaaattaatccatatgtacgatccatattcttaagcatcgtttcagggaatacatctaagttagtcaaaattcgattgaagcggtgcaacatatagtcgacgccaatagtcgtatcaggcaagataactcgttcggcacttgaatgagaaatatcacgttcatgccataacgctacatcctcgtatgctgtaacgacatgtccacgcattactcgagccattccacagaggttttcagatccgatcgggttacgtttgtgtggcattgcagatgatcccttttggccagcgcggaaatgttcctcaacttcatgaatttcactgcgctgcaagccacgaatttctgtcgcccaattttcaatactagtagcaatcaatgctaatgtcgcaatgtattctgcatgcaaatcacgaggcaatacttgactagtaattggctgttgtgtcaaacctaattgcttcattacgctagtttcaactgcaggtggaacattagcaaaagtaccaacagcacccgaaattttgccagattcaacgccttttgcggcatgttcaaatcgttcaatatcacgattaatttctgcgtaccagcgagcaatcttgagaccaaatgtagttggttcagcctgaacgccatgtgtacgtcccatttctactgtgtacttatactttttagccttttctgcaatagttgcttttaattcgtgcagatcttttctgataatctcatcagcttgtttaagtaagtagccttgagcagtatcaaccacatcagttgaagtcaaaccaaagtgcacccattttttctcagggccaaggctttcagacacagttctagtaaaagcaaccacgtcatggtgggttacttgctcaagctcagccacacgctctgcagtaaagctggcattcttagcaatcttctccgcatctgcttctggcacttcaccgagttctgcccaagcctttgttgcggcaatttctacttcaagccaagctgcatatttattttcgtctgtccaaattttccccatttctgggcgagcataacgttcaagcataaattacatttcccatggattcttcaaaacaatagtttgttcacgatctggaccaactgaaacagttaccaaaggaacgccaaccaactctgaaacgcggttcaagaatttcttagcattttctggaagagcgtcccaagtcttaacttgagtaatatcttcatcccaagctggaagttcttcatatacaggcttacatctgtataattccttcaaacttgctggataataatcaatcttttcaccatcaagttcatatgcagtacaaatcttgatcttgtcaaaacctgaaaatacatcaagcaagttcaagctaaggccattgataccagcaacacgctttgagtgacgcaatgcaacggagtcaaaccaaccaacacgacgtggacgaccagtaacagtaccatattcatgagcagtttcacgaatacggtcaccaacttcatcaagcaattcagttgggaaaggacctgcaccaacacgagtagtgtaagccttgcagacaccaattacagtatcaagacgattagcacctataccaatacctgaacaaataccaccagaaatagtattagatgaggttacaaatggataagtaccttcatcaatatcaagcatcacaccttgcgcaccttcaaataaaactttcttattttggtcaagtgcatcattcactaagacagaagtatcagttacatacttcttcattctttgaccatattcatagtatttatcaaaaatgtcttcaaatttaagtgctggcttaccataaaccttagtaaataattcattctttacttcaaggttagcacgcaatttttcttcaaaggtgtctttttcaagcaaatcacaaacgcggattccaattcttgaagccttgtccatgtaagttggtccaataccattcttagtagtaccaatcttgttagcccccttagcttcttcttgatattcatcttgcttaatatcataaggcataatgatgtgggcacgattagaaattctcaagccactagtatcaatgccactcttttcaagattttctaattcgccaaacattacttctggattgattacgacaccattaccaataactgtattgtccttggctgcaaaaataccagaaggaattaaacgcatcttgaaagtttgaccattaatatcaatagtatgacctgcgttgttaccaccatttgaacgaactgcaactgcagcatccttactcaaaaagtcagtaatctttcccttaccttcatcgccccattggcttcctacgactgcgactgctgtcatttaaaattcacctcataaaaatctctataaatattacgtatgctagtctagcaattaatttacaaataatcaatataaaatccgaattattttatttttaaattatttcatagttcgatttttatattgacaaacacaaattattcccatatagtatgtctcggtcaacaaacaagattaaagggagcagttttaaaatgagtaactactttagtatggaagcctttgactatgatgatatccaacttgtacctaataagggtattatcaaaagccgtcgtgatgcagataccagtgtcaaattcggaaaccgaacatttaaaataccggttgttcctgccaatatggaaagtgtcattgatgataaccttgctatttggctagcccaaaacgattattattacgtaatgcatcgttttgaacccgaaaagaggatttccttcatcaaaatgatgcatcaaaaaggattattcgcatctatttcagttggcattaaagacagtgaatatgattttattgatgaattagtcaaggaaaaccttaaaccagaatatattactattgatgtagctcatggtcactccgtttacgtgattaagatgatcaagtatattaaggaaaaattacctgattcatttttaacagcgggcaatattgctacgccagaagccgtacgtgaactcgaaaatgcaggcgccgatgcaaccaaagttggtgtgggacctggtaaagcatgtattaccaaattgaagactggctttggtactggtggttggcaattagccgcattaagaatgtgcagtaaatctgcttctaagccattaattgccgacggtgggattcgtcataacggcgatatcgctaagtcaattcgttttggcgctaccatggttatgattggttcaatgctggccggtcatgaagaatcacctggtaatgtaatcaaaattaatggtaaaacttacaagcaatactggggctcagcctctgaggttcaaaaaggtgcttacaaaaatgtagaaggtaagcaaatgttagtgccataccgtggctcaattaaggatactttaaaagaaatgaaggaagacttgcagtcatccatctcatacgctggtggtcgcgatcttaattccattaagttagtcgactacgtaatcgttaaagacaatatttttgatggtgataagtaattttaataaaatttttgcatttttattattttcctgttaagaatattacgataatatagtattatctatcttttttcgatagaataatataagtcgagttattgtagggtagtcaataactcggctttttttgattattttttaaaaacgattggacagagttttaaattgtgttatactagttgtcgttgatgaatgcgcccttagcgcaactggatagagtgtctgactacgaatcagaaggttgaaggttcaaatccttcagggcgcacttaaaaacgggaaatggctcagtttggtagagcacctggtttgggaccagggggtcgcaggttcgaatcctgttttcccgataagttagccgcacttcattgaagtgcggtttttttgtgtaaaaaaataagtattccctcggaaatacttatcatgctatgcccctttagtagctcgtctaaagataatctgtgtatctgaatctacatatttcaataacggtaaatcgtaatccttaacctgggccaaaacatttactttctcattgcatggcaaatcgcgtttagtaatctcgatttcgccttcataacgcggatacaaatgattatcaatcgtcacgctgccagttggtctagcataaatattatcttgcggctctgttgacaaaaacatcttttttctgctttcctttaagcgaactacgtcacgcgccacatctggacgattatgccaatcattaccaaacaattctggtatatcagtatctaaatgcagtgtaattgcaccctgtttttgataattagtaatcgattcaattgcatccctcgtaagttgcggatctcccacaaaaatgtgatcgcaatcataatctttcaattctaagatcgcagctaatgggttttcatatcgctgcttctccaacgttggcaatcctgcaaaaattggtccacgcaatttgccatttcctgaaataaaggctgctgttttcaaaccatattgcttaagccactcattcttcttttgcatccagtgtgcatcaagacctgtttcaggacgtgggtagaagttatgtcctgctgttaatttttcaaaatttgcattgctataacgcagatcatcaatattttgttgcgtaataatgctggcatttagaactatcggcatttctttggacaacttggcaataatatcagtagaaaatccatgatctactctaagaccagttagactcaaacttttaatttgctcaacactattgacattaatacccaaatcttgcagatcatctgccgtgacatctgcaataattttcaagtctagtttttgacaccaattagttaagtccgccagccgatttaaaatcgtctcactatcagtatcaggtacagctagctgagtaaaaacgcaggtaaatccactattgcgcatcgtcagcaaataattgtaattctcggacgtcaaatcgtgtcctagataaacagaaaatcctaacattcttattcctctaaaattaattaatttcttttattatctatagcttaaacgctttcttaaatatcttactacattttttgcttgcttttttctaaaaaataatgttaaatacatataaacaaattaaaaagcgatgaaaaagacgagtaaataatctaattctttccagtgaattagtgctagtgtgaaactaatagaccctggattattgaaaaacacttttagcagctcactgaaacaataattcttagagtaggttgagacgtctccggtacgttaccacgccggtggagcatgatagtgcttcatgagtcggtctattaaaatatagacaatgtgggtggtaccgcggaaaaaagcctttcgtccctgtttttttagggagcgaagggctttttctttgctctaagtacattagaaagaggacttatattatgacacttattttacctaaagattatcacccaacattaactgtgcgcgacactgaagctgcgattgtatttattcgtgaaaccttccaagataaattggcagaaattctcggtttacaaagaatgtcagctccaatgtttgtcgaaaaaaagaccggcttaaacgacaacttaaatggtgttgagcgtcctgttgcctttgacatgaaggcaatgcctaaagaagatactatcgaagtagttcactcattggctaaatggaagagattggctttgaaacgctatggtttcggaatgcatgaaggactttacaccaacatgaacgccatccgccgggacgaagatcttgataacttccactccatctatgttgaccaatgggactgggaaaagattattagtaaacaagaacgcaacaccgacacacttgaagttactgtgatgaacatttttaaggcaattaaggcaactgaaaagctggttgctgcacgctacccaggctctacttatcgcctagctgatcacgtttcatttattactactcaagaattagaagatcgctggcctgatctttctccagaagagcgtgaagataagattgctaaagaagaaaaagccgtctttattatgaaaattggtgacaagttaaagcgtagtggtgaaccacacgatggccgtgcaccagactacgatgattggcaattaaacggtgacttagtcttctggtatgaaccgcttaacagtaagattgaaatctcttcaatggggatccgtgttagcgaagaaagtttgcgtgaacaattgaaaaaagctcactgtgaagaacgtgagaaattaccattccaccaaatgcttttgaagggtgaattaccttattcaatcggcggcggaatcggtcaatctcgtctctgtatgttgctgttaggtaaggctcacattggtgaagtacaagcttctatttggccagaagatatggttgaggcttgtgaagctgacgatattaagttgctgtaattttaagatttttttacataccaaaaaagatcctgcaaaatgtaggatcttttttctattgattttatttccgttctcttctagaaatccaagccataatcaatggcaacaatacaaagccaaagaccatcatcgcaatggcataccagttaacaccgataacttgccctgctgcgtttactacaccaaattgtgccttccagttatattcaactaacaagaagatcacaatcacaccagataaaattggcacaataacatcagtcataacgctcttattagcctttaagatatcttcttttgccttaccacggtaaaattgaataactgctagaggtaccacgatgaaacctaagaatctaaccatcgcgctcaaagtaatcaagttgaccatattgtattcaaaggccatcggaatcaaaattgccaagccaacagagataaagaaagttctaattgggaagttattcttagttctcttagttaaagcttgtgacatctgaccctcacgagccatagcttccagaatacgtggagcattaaagctggaagctacgttgatcccaaacattgaaaccaaggcaccaaccaagattacatcacgtaagatttcattattaaaaatagccgcaatcgctacaacttgcttagttgtcattaaagcacgtggattaagtaccatcgctaccgctacaacgccgatatagacaaccgcaataattaagattgccaatggaattgctcgtggcaagttcttttcagggttcttcatatcttctgaaccagaagctactgattcaaagccggtaaaggcatagaaggctgaaacaattgacatgacaaaggtagttgtagttaaagttggcacaattttctgaccattctgagtcaattgatctacttgccctaggttgcttgatgcaccagtagtaattaacaaaactactccagcaataataattaataccaatgcagccaacttaccgatagtagctaaattcattacatacttaactactttttgaccaaacaagttgatcacggtaataattgccatcaagatcaaaaagccaattgtgacatttattgccttattgggatttccgccaaaaattgaaatagttgacttaattaccccaacagccattacgccccaagctacactggctgagaagtaacgcagaactcccatataaaagccaatttttttaccaaaagcggccttggaataagcataggcagcaccagatttagtgacatactttgaagctgccgcaaacgaaatggccagaatcgctgcaaaaattgccgcaattaaatatacaactaaagctttactaccggcttgctgtaccacactaccaggtgttaaaaaaatacctgaaccaataatggcattaatcgctaacagcacaattgaccaaaagcctaatttatctcctgttttttcagtcatctatttgcttccttactttgcattatcaacaacaaacttaaataagttattcataaacgctacatcggaattacggtgcaacatttcagggtgccactgcacggcaatgacattaccttgtttattttctagcccttcaaccacaccatcaggagctgttgccactgcttttaaatctggtgcaacgtctttaattaattgatggtggaaagaattaacgcgaaattcagttttgcccaaaatttcagccaatttactatcagcttccacttccatactatgagtaggcaaagttggcgtatgaccttgcatgtgtttcaaagtaagttcttttctgtatgaaagatcttggtaaagcgtaccgccatgagccacattaataatttgagcaccacgacaaatgccaagtaccggaataccattttcttctgctaactttaacaagcgcatatcaaaatgatcgcgttcaggccaagtagcaccaatcttttgcattggctcctcaccataaaaacgtggatcaacatcatgcccaccagataagatcaagccttgaacatgattaagctgttcacgaatcacctcatcattttcagtaaatggaataatgtaaggcacaccgccattttgaactactgaatctacatagtcttcgttcacataactacgatggtatcctgggaaaattcctctatcgtcaataattacagaacctgagataccgataattggttttgtcatttatgctcctccttctgcttactttttgtatgtaatattatagagaaatttatgcaaaaagtacaattaaaaaattgcattgttgtctataatttttgcatatctttaaatatagtaaaaaacagcaagccttatttttagctcactgttttatgctatttataccaaattccaaaaaggatttccattacatgctaaatatgtttctagccactgtttaaaagagaaatcaaaatattgttcctctattccaggatacgttagataggactgtttttgattgtagcgatctaaattaatgcccatttctccctcgtctcttaaccaaagtataggtagataattaggtgttttaactaactgatttaagacatactcaatagtgtaaattctacaccttgctccacctaattcgatgccttgaaaagaatcaatgaataattctgcaccgttagcctgtatccaaaactctatcaaatcatttgggacagatatgcctgacaacctatttattttattttcagctactggcggatttaatttaaatttacagtaatagacgccaccaaaaccaaatattggtacgtcgacactgcattttttactaatcaaatttatattatctattatattatccattttaataattaataaaccatttagttataagcttatgtgcttcaattggtactggcattaagttgtcaaagtcattatttccaccataaattctaggtcttatatgatgaacttgattttcagcccaatactcttttgattgattgccataacgctcactaaactcttttatatagtaatatctatccatcgtagtccatactggtgaagaaggaagtctagaccaagtagtattgattggtgtttctgcatcttttttagagacaggatcaacatattcaggaaaattttgaccaattttattttgtaaataaatagaactaagtgaaattggataagtagcgctatttccattatagcctaccattccccatgctcctccaacagcaaaaaatgttgtagcagctggaaatacagcagaccctaacaaaccagtagtaatattgccttcttttacaattggactagctgtatttgtagtaattgggccggacaatgatggttcactatagaattgcaattgaactgaaattgcagcaggagctggaccagttattgaatcaatataaaaattgattttaaattgtccatctacatactcttgtgaagtatgaaatttaacaactgtatctggaatctctgccaaaaaagtatatgcagagtaatggctacttgttgcattaaaattattatgaatttttacagttccattttttaaaatagggacatctttttttacattttcattctttaacttatcttgagctaaagaatgaaaattttgttcattagctattttagcaacattcttatttacatcatttagcgagtcagcctttgcatttgtattgatagctataaagcacacgatagtggctaaaaaagcaaataactttctgtatttcatgtttctttcctcattatctataatttttaacacaattataaggatctttctattattctaccatacaactctatcacataagcaagtgctcccacactgtagcatcagatgctactgggatttacactctagattgatgtatacgaagaacacaattacaatcagaataacatgaaatactactatagcgacaatttaaaatatacagtaaaatctttaaactgtatttcttattctaacccttgttcaaagcgatactgccgtaatacatattccttgaaaaacggtaaagtaaaggccacttcaccataattagtagatttgataacttgatcatctaacaagcgtctacgatagttagcaacaaaattgcttggacggtttaacctttcatgaatttctttaattgaaacacaatgttttgggctctgagccatagctaaaacaaattttcggtcttgctttgacaaactactaagtactttggtataaacattttgctttagcaccaataagtactctgatttaatacattctaaagtgttttgatctattaccttactttttttagcagctttcaaaactaaataacctagcaactgaaaggcatatgaatagcccattgtcatcaacgccattttttcaagaatttttttcgacacttgataacctgattctttaaaaactttactatagctagcttcaacctgtgagagattcaatgctgataaagctattcgctttccacgtagtaagaatgaagttatattttcgtttttcaattcagagatattttcagaaagaccagctatcattaaggctataggataaccctgccgatttaataattgataacatcttgcaaaatctttcaactcctgacatagttttacttcgtctaaggtaatcaacactttaacgtcattttttcttacttcatcaaacatgttcgttaaaatatcttgatatgttaacttactaacgtctgtagaaagcgataatccaaaattagagaaatttagtccttcaatagatttaaatgatttttttagttttgaatctgcattcagatataagctattaataaaagaaggcaacaacttcatccccatggccaaattaacaacaatccaatctggatatgcactaatctttctgtccattgctgtcaaaaagacagttttgcctattccacgcattccataaacaatcgaaattgtatatgaactatttaaattctctattccttgagacacatcagcaattagtttttttcgctgcaaatacactgctggaattcggccaaagctaggattaaacggattatccatattttgtccccaatcattttcttatcaaaaaagcagcaggcttcttacctactactcaattttatttatctttttgatgcttaaccacataaatcagtgccgcaataatcaacactgctgcaccaaccgctactgaaatttgcgtctccggattaatgaacatgaagacaacaattactaccagcataatcaaagcaaagtaatttgaatatggataaagcggcaatttaaacgggtgattctccatcaagtgtggattctttcgtctaaagcgtaactctgctagcaggatcacaaaccaagctaccatccctggcaaaacagatgaactatagacaataacaaaaacattagccaatgatttattcaaaaattgggctaacacattaagcataaaaccaacgaaaattccactggtaattccaatgatcgcatgactaggcacgattctcttagatacgtgaccaaaagtcttaggtgcttcaccttcgtgtgccaatttatacaacattcgacttgatgaataaattcctgagtttgcaccggacaaagctgcagtcaaaactacaaagttaattactgaagctgccgcggtaattcccaccttggcaaaggtcgttacaaacggtgagccaatgctatctaatttattccatggataaattgtgacaatcacaaaaattgccccaacataaaagatcaaaatccgccacaatactgacttcacgcttttaacaatggccttatgcggatcagatacttcaccggctgaaatcccaattagctcaattccttcataagaaccaacaataatggccattgagaaaaagaagcccttgagaccaccagtgaagaagccgccatgactccacaggttagaaaagcctactggatgaccgccattaccaaagccaaatagaattaccgcaaagccaagtaaaatcattaagataatcgttacaaccttgatcatggcaaaccagaattccaaggttgcataagctttcgcactagctaagttagccaccagcaaaaataaaataataattacgccggcaacccaatcagaggtgcctttccaccaaaagcgcaaatactctgttgttgccaccacctcagaaattccgacaacaatgtattgaaacacgtttgcccattcggctaaatagccggcaattggatgcacatgctctgaagcatagtctgcaaaagaaccagtacctggatcaacataaagcatctcacctaatgcccgcattacgatatacaaaataaccccaacaaaaatataagctagcagtactgaaggaccggtccacttaatggttgagctagcccccatgaatagtccaacaccaattgctcctccaagtgagatcatttccatctgtccggctgtcatcgaccgctttaattcaggtgctttcttcgccatttccaactccctttctttagcatctgtaaaaatttcctaggaaatatatctattctcatttatctttaatcactataccttatcattttttcgaacaaaactgtagctgatcgctaaaaagattgcaaataaaatcgaaataatcaaagccagctgcgttgatttgataaagaataataagattaaaataccaatgtaaaaggcaagcgtaagccagctagttactgggtagcccggcattttaaagctgcctaaattctgcttattctgtttgcgataaacaatatgtgctgccataatcatgatccaaacaatcacaaaacaaatcgttgaaacagttgagacaacggagaatatttctgctggcattaaatagtttaaggcaactactacaaataaaattaatgaagaggtcatcaaagcgttcattggaattgcttttttggtcaattcacctagtcttttaggtgcatggccgttacgtgctaatgaataaagtgatcgactagttgaaaagattgcactattagtcgctgacatagctgcagtcaaaacgacaaaatttaaaatccctgcagccgctgtaacaccgatgccggtaaagacctggacaaagggacttgaagtagttgtaatgtgattccatggataaacagacataattgccaacattgagcccacataaaaaaggccgattctaactggcaaagtgttaattgccttaggaatatccttttgcggattagctgtttcactagcagtttgacctacaatttctaccccaacaaaggcaaaaacaaccatttgaaatgataaaagaaagccccaaatcccagttgggaaaaagccaccatgattaactaaattagttagtgaaacataaccgccctttacatgcgtatgaagtaacaacattacagcaccggtaatgattaagactacaattgccattaccttaatcattgagaaccaactttccagttcaccaaataatccgacatttaccatgttaatcaacatcaataagatcacaattactaaagggccaacccattgcggtagccacggaaaccagtatcttaaataaattcctgtcgcagtcaaatcagccatagctaaactaagccagcaagcccagtacatccagcccgctacaaattcggcacgcttacctaaatattttttgattgactctaaaaatgaatgactatcaggatcggctaaaataagctctcctaaagcacgcatcataaaaaaggtgataatccctacgattaagtacgacaaaataattgaagggccagcactatgaatggctgaaccagaacctaagaataggccagtaccaatggctccccctattgcaatcattgttacgtgacgactcttaagcccgcgttttaatctcggcttctcatccataattactcacaccttcctcaaaataaaaaatggagcggcatgttttttaaatgaaacatgttgctccatcaagtttgctttttttgaattatatagtcttataccaattcatgcaattattttttatctaaaaaagatattcccttaggaatatcttcattattagtaaactttaaattggttcaacggccagtaacgtactttaactacgccaacgatactactacgcttaatggttccgatataacggctatccttagaaacgctccggtgatcacccattacgaaatatgttcctttcggaatgcgcccagtatcctgcacatatttaatctgcgctctagtaaagtattgctggtaagtccgcgcccgcatcagtgactgcatagtaaaattctgagtctcagaataaaatgtatctgagccattatcaattaacttcgttccttgtttcaaccaaggttgagcaatctttttattattaatgtagatttgattatttttgctgacgattttttcaccaggcaaaccaataacacgcttaatgtacaaagcacctggttcatctggtgctttaacaatcactacttcaccacgcttgatttgcgcatgacgctcagcgattagccgatcaccattttgaaaagtaggttgcatcgaaagacctgatactgtatcgttgctcaagacgaagtggaaaagcagcagataggcaccgatcaaaataacccagataattaagatatctaggaaaaacttaccccatgattctttttcttcttttttctcagccattatttttctccatttatctttttccacagtttacaactttatggagaaattgccaaattacaaaaaagaggtatttcctcggaaatacctcttttattattaatgactattaattagtcttcttttttgtcttcagttttagcttcgtctgaaacttctaccgttacacccttcttagcaagaacatgagacatcttcttcaagtaaatgttaatgatcttgcccatgtcttgttcagtaagtgagttgaatggaacgattgcgtccaaacggttcaagaattcaggtctgaagtagttttcaagggctgagattaacttgtcttggtcaaccttgccatcttcaagcaacttgtctgagaagccggcgtttgaagtcataatcaagatagtatccttgaatgaaacagttctaccttgtgcgtcagtcaaacgaccgtcatccataatttgcaataatgcgttgaagacttgtgggttagccttttcaatttcatcaaataaaattaatgagtatggttggtgacgaaccttttcagttaattgaccaccttcaccgtagccaacatagccaggtgctgaaccgatcaacttgttaactgccatttcgtcttggtattcactcatgtccaaacggattaagtgttccttgttaccaaataattgaattgccaattgtttagcaagttcagtcttaccaacaccagtaggtccagtgagtaagaatgaaccagtaggtctgtcgctgtctttgaaaatttgcttacgagcaatagcgtcagtaattacatcgatagctctgtcttgatcaataacattcttcttaagtttcttagctaagtccaagttcttttgagcttcatcagcgtgaagttcactcattgggatcttagtcttttgttcaataattgcgtagatgtctttttcagttacttctggagtattcttagaatctacattcttaagttgtttctcaagttcagcaatcttactcttaatttctgaagccttgtcgtaatcctctgccttagcagcttcagtcttcttagcttcaagagctgagatttggttctttaagctcttttcatcagttgattgtacaagcaatgccttcttagcaccagcttcatccatcaagtcgatagccttgtctggtaagtaacggccttgaatgtatctttctgataattcaacagctaatttaagactgtcgtcactgtattttacgtggtggtagtcttcgtacttcttctttaagccttccaaaatcttaacagctacatcagtagatggttctggaacttgaacagcttggaatctacgtgataaagctggatctttttcaattctttggaattcactagtagtagtagcaccaattaacttcaattgaccacttgccaaagctggcttcaagatgttagctgcatccccattgttgttttctgaatcagtagaaccagcaccaacgatgttgtgaatttcatcgatgaataaaacaatgttaggatcgctcttggccttgtcgataaccttctttaatctttcttcaaagctaccacgaagacttgaaccagcaaccatgtcattaatatttactgaaatgatatgcatgttagccattttagctggtacattacctgaagcaattctttcagctaaaccttctacaatagaagtcttaccaacaccagcaggtccgattaaaacaggattattcttcttacgtcttgaaagaatttcaattacgttatcaatctgttcgtcacgaccaattactgggtcaaatttattgttcttagcttcctcaactaagtcaacaccaattggcttttcattgggttgttgtgggttctgttgaattgtttgtggtgcagcacccatgctgctggagtaattaattggaattgaacctgaactgcctttgctatttcttctgctaccaaagtcgtcattaaagaatgagctattcaattcgttaaataagttatcaaaatcattgtcaaagtatgccatatgtgcaacactccctatctcaaatttacgtctttagcactctagcttatcgagtgctaactcattacatttaatagtatagcaggttatccacagactgcaagctaaaaaacaaaagttttacacattttcctttatttttgtgatttttatttaaaaaagcactacaaatgctgcaatataaacatttgtagtgcttcacaaattataaagaatttcttaagatgggcaaaaattgatgattattttgcttaaaactgttgaattttaaggaagttttccacagataagaataagtttattaccataaactatttctgcctacctctattattgcccttttgcttgtccagtattttgcggttcgctcaactttctcggcccaagaaaatactgtttaattactttgattacctgcttattctgaggtaaatccgagtgatccgcttctacacccgttactgtcattgcagtatagctcttgacttgattctgaaaaatatattttccggctgctacgctagcttctggtacaattccatcagactcataattttttccaccagataaggaataaacaatcaagtttttcggtagtttatctttgttcttgataaagttttctagcatttgcgttttatgattaatatttttttcaccaaaattatatggcgttcctagcgtcatcagacgtttgattttaatttcatcagaatagtaacagtagtaatgttctaaccaataggtccagatcaagccaccgttagaatgcccaaaggctttaaaattattaaacttatagctctctgataaggcataaaaggcttgatcaaaccagctggcttgcttcttaatattgctataaccatcgtgattattttcaaaaccgacaataatgaaaggttcgttgtcgtttttattaattttgcctgaatatgacagcgttccattcgttgaaactttaattttaagcacgctatgcttagtcggtgtgttctgatttagctgcttcactaattggttaaaacgttcagtcgttgcactagaacctggaatcataattactggtgacaaaagcgatttgcgtctttcagctctagcgtggttatcagccttcatccaagaataacccggaatagccaaagctactaataagactaagacgattgccaaccatttaaaattaggattttgaactaaattaatcatttttttcttcataatcctttagtcccctttcaagtcgcaaacctaatttcatagttggaataaacattattatatccaaaatgaataacaaaatagaaaataccaagttgctccaatcaccattggaaccaaagaaagagaccaaaattcctggtgtcccacttaaaacggggtaagcacaaggttgaattaaatggcaaaaaattgctccagcggctagtagaatattaataattggaataatcacaatcgccggcagtaacaatggatttaaaataatcggcatcccgaccatcatgcctccagttgagcccaaagctgctggaagcaggttaaccttggcaatattttcactatccttatttttactataaattaggataattacaatcatcgctaaaacaatactcgcaccacccatttctgcataaggataaaacaaagaactacccaaatacttatatggtacattccaagcactcccatgttttaaggcaaaatttaagttagctgctgctgaaatactattagaagtagttgacaaagaagctagaggataacctattcccatccagctaagtaaaaagactgggatagtcagtaaagctattaacaaaatattatttgattcctgtatttgagtaactaggcctttaaaagtactagaattcaagaatttgatttgaaattcataaattataatccccagaactatcccacaaaaaattgcaaatattgtcgggataaacgcattccaggctctttccttaattctagcggcatgttcaaaatcgactggcttgtgttcctttcctagccaatgaaaaatttgccctacaccatagccaattaacaaggccagcaagacagcattaatttttaaaacactggaagaaaatggtgaatgatcgctggcattattagctaaattattggcataagcacaaaacatgataacgatgacagccgtcatcccggccatggttgaatctttacggtataaacgcgcagtataacgtgccgcaaaataagccgcataaataccaaataagccgaaggttacccgaaccatcccccgactgacaaatgctcccgcataccaaaaacgatctggcaaagtgatatcaaaattaaaaatattgtaaataaaactatcgggcgaaaaaacggcatctctgaacaacttaaaatatgccccaattaccgcgatcggcatcagcataaccaacgttcgctgaaaaattctaaagattgccaatcttcttagtttaagaaagatatttgtgattctgtttaccatggtattttcctttacctatctattctaaatatgattgaataaagttaattaaaacaattattaattatacatctatactagaaagctgattatgatggcttacattaacttaaaaaataatactaaaatttaccaatctggtgacacaaccatctatgccaataagaacattactttttctatcgataaaggagaactagtcattattctcggctcatcaggagctgggaaatctactttgcttaatattttaggcggaatggaaccaaatacaagtggcgatgtaattgtagcgggaaaaaatattgcaaaatataacgctaaagaattaattacctatcggcgcaacgacgttggctttgtttttcaattttataatttgattcccaacttaacagcaaaagaaaacgttgaattagctgctcaaattgtccctgatgcgatgagcgccgatgatgccttgcagtatgttgacctagggcagcgagaaaacaattttcccgctcaactatcaggcggtgagcagcaacgtgtggcaattgcccgagccatcgctaaaaagccagccttacttttgtgcgatgagcccaccggtgcccttgactataaaacaggcaaacgaatcttaaaaattttgcaaaatatgagccggcaaaatggctcgacggtcttgattgtaactcataacgccgctattgccccaattgctgataaggtcatccgtattcacgatggaagtattcaaaaagtccagcataatctacatcccgctgatattagtacaattgaatggtaggtgggcgacatgcaaaaaactattctatggaaagatgcttggcaagcaatcacccattcacttgaccgttacattgccattattctattaattgcactggggacttttgcctttacaggtttaaaaatggctggtcctgatatgcgagcaacaggggcagaattttttgccaaacataacttagctgacgtcactgtcacttcaaactatggcattaattcaactgatcgccttactattcagaatttaccggaagtaaaagaagctacttttggctattttcaagatgttaaaattaaaaatcaacctgatacgctccgcatcttttctcaatcagataatctttcaagttatgaattgattaaaggtcattttcctaagaataaaacagagattgcactgtcatatttattgcagaaaaaatatcgcttggggcaaaacattacttttaataaacctggcattttaaaaaataagacttacaagattgttggcttcgtcaaagctagtgagttcttagataaaaatccaatcggtcaaaccaacattggcagtggccatttaactggaattgcggttgctaatcataacgccttcgccgcaccagtttatcaaattgcccgaatcattttcaaaaataccgccaatttaagtccctttggcatagcttaccgcaaccgtgtttataacgatcaaaccaaattgcaaactgctttaaaccaaaatcgagccgacaaatatgacaaatatcgggccatgtatcaaaagcaatatcgacaagctgcagctaaacaattacttaaacgtggcatcgtagttaacccggcgcaaatcaaagtaccacagaacaagcttaaaattgcttatcctaactacgtaatcaacagccgtgaagaaagtcagggttatgcttcttatcgagcagattctgaacgagttgaagttttggctaatgtctttcctgttttcttgtttgctgtagcggctttggtcagcttaactacaatgatgcgttttgttgaagaagaacggactaatattggtacgctaaaagcactaggctatggtaatggagcaattgccattaagttcttgctctatagcacctcagctgcaattttaggtgttattctgggggctagcttaggttacacctttttgcctaacttaatcatcaaggcctatttagctagctcaaccttaggaactgattaccagctgaattttgcttggggaccactattaatttcattgacgattgcactacttgcaacaaccgtcgtttcaatgattactttagctcaaactctgcgtgaacagccttcagctttacttttacctaaaccacctaaaaatggttcacgtattttactagaatatattccatttttatggaagcacatgagcttttcagctaaggtaacagcccgcaatattttccgttataagagcagaatgctgatgaccatcctaggcgttgctggttgtactggattactagtaatgggatttggtattcgtgattcactacacggaattggcaatattcaatattctgaagtacaaaaaaatgatgtcatcgctttgaaaaaccgccatgttaacacgactgagcgacaaaaattaaacaaaatttttaccagccatgatgttacgcaaactactgctgtacaatatcaacaattgactaaacaccttgatagcactggagcaactgaaaatgtaatgctaattgcgccacaatcaactaaaaactttagcaaatctatcaatttgcaagaacgtcaaagcaagaaaaaacttgttttgtcaaataatggtgtagtcatttcagaaaaattagctactatcttgcacgctcataaaggttcaacaatttccttaaaaaatgaacatgggaaactacttaagttcaaagttagtggaatctgcgaaatgtatctcggtcactatatctttatgagcccagctgaatatgccaaagaaactggcaaaaaatttactactaatgcctatttagtaaccatggccaaacattccccaggaaatatcagccatattagtcaaaaaatgatcaaaacaggcgcaatcgaaacggttgtctcaacttcatcaaatagaaaattgctgagcagtttcactggtagtctaaatgaagtcattctaatcctaattttaatttcagggatgttggccttagtagtcatctataacttaactaatatcaatgtcgctgaaagaattcgcgaattatcgaccatcaaagtgctaggattttacgataatgaaacaacgatgtacatttatcgcgaaacaatcatcttatcggcactaggaattatcgtaggctttggctttggttggtggctacaccactttattatcactagtttgccaccagatgtcgcgatgttcgatccgaatatgtacccgttgaacttcgtcttctctgcgctaattcccgctattatcaccgctattttagcaattgttgtccatcacaagatcaagcgaatcaacatactagatgccttgtcctccattgattaagcgctgttatgctataataatcactatagaaaagggtggaaaaaacatgccaagaaagcactttgaattaaacagtgatgttaataaattaatcgaaaaatatgatgaaattaataatgttgatttcaataagttagttaacaaggccttaagattctaccttgttaatcaaatgaactacaaagatgttcaagacgccctgaataaagctgataacgaagcttctaagtatattgatgaagcaatgcgttccagcatgggtgatattaatcgaaattattagaacataactaatcatggaaaaagccatctgttttgacagcaggtggcttttagtattcattacaagataatttattataaaaacaactaattgataatttctttactcaaaatgcttataccgataatatcgataacctatctttttaccaaaaatcgtctccgaagttttcatccaattagccagcaaaacataaatgcctaaaaagactaaaccgaagattgctaaataaccaaaactaccaacacggcctaagtcgttgaaacgatagccaaataaaatttggtaaacaaagagcaggataatgtaaatctcgtttgaaacaatgatcggcaacaaactccccatcttaacgccatatgtcttattaagcttgtgataactgagccaaattaccagtaagaatgaaatatcagttgaaagaattgcaccatccccattcatgaacatagtcatcggtacttgcaaaattatttttactaagacaccttcaaccatatagatcacagccagtttgttcatgttcaaagctaaaagcagtgttaatgaattcatcaccaaaccagcaaacaaactttgaacaatattttcaaccaaataatacgcacctaaactatcgtgtgagaacaagaccgtataaattggagaagccgcaaaagcaccaagtgcaacaaccggaagcaagacaaataatagtagtctatagttctctaaaagcagctttctaatgctttcttgactatcattagccttatacttaagccctgctaaaagcggcagactagtctcagaaacggctgtcgcaagtgaaataatcaccgtggtaatcttgcttggattagccgagaaaattgtgtacaagtaactaacatagcttttactcatatgactgaagctaatcaggatttgtttaaacaaaagttgatcaactaattgcgtaacagtaatgaacgatcccagcaaaacaaacggaattgaggcataccataagttaagcaaactacgagaaacattattaagtgctctgggctcgctattttcaattaattctcggtaatgtccccactgcttgcgcatatatgcaaaaagatacaggtaactagctatagcaccaacacaggcgccaaacacactgaaataaaccgccgttacgtaatcatgatggaagacttcaataatcaacaaagtagccagcaaaataaacaaaattcgagcaaattgttcccataattgggaaatcccatatggcttcatatcattatttccctgaaaccaacctcgaaccatactcattgatggcagaattactacggctggcactaatactcgaatagaaattgttgcactagccactgaatccactggactatttttggcaatcattggtgccgtcacataaagcaaaataccacacgctattcccatgaccagcataatagcgaagcctaatttggtaatgtacaaactgtctttatatctattttgcgaatttaattgcgatacttcccgggcaataactgaaggaagtcctgccgtcccaattgataaaaacagcgcatacggcgtatatgacgaattgaacagcgcctgtgcgtttaattggttgtggtagcttcccagcataattagccaaggaatcaaataaacaaccccgagaattctagatacaatgctaccaaacgatagccaaaatgaaccggataggatttttttattcaatagaatagcctcaaatctacgttagtttctcattgtgccttcttattatacgtggattttataactttgtgggaaatatgtaccaactagttacccttttttaacaaatttttcggctctaataatacaaatcagttacattatttactatattgttacccagcctttaattttacgttagaccccttgacctaaccttctttaattattatccttaaaatgtttctgttaaaggtcataattagacaaaaataataatgtattaagaatattcatcgggggaattaagttgtcattcaagaaaaagattatcactaaattagcttatgttgctatgctttcaactactggcgttgccgcagctgcaatcgtgcaaccacaagcacatgttcaagcttctaccacttcagttgctgctcgctcactcggaatcgatgttgctagttaccaaagtgctgatctttcagctcacgctaaaagcggtgctaagtttgctgttgttaaagtaagtgaaggtaccagctacagaaatcctaaggctagtgctcaaatcgctagtgcccgcgctaagaatatgatgccaatgggctaccactttgctacattttctgctaatagcgctgctgctaaaaatgaagccaactacgcaatcgcatcagctaaggctgttggtcttggtgctggctcataccttgcatgtgactatgagtcaggtgacggcaacaatatctatggtggtaagaatcctactgctaatgcaattaatgccttcatgagcaaggttaaagctgctggttacaagccacttctttacgctagttcatcagttttaagaaacaacattaacactaactctgttgttaacaaattccctaactcattatgggttgctgcatacgctgtttcaggtcgagtagacaatcctaactttgactacttcccatcaatgaagggtgtttcaatttggcaatttactgacaactggcgtggtcttaacgttgacggtaacattaacgttttacctcttacttcatcaggtagcgctgtttctcaagcacctaagaaggctcgcgtattaaagaagaaggctcatgtatataacaaggctggtcaccgtacaggcaagactattaagaagggcacttctatcactacccatggcaagaagaaaactatcaatggtaagaaatactacaagattgccaagaatcaatacattagatcagctaacctttactaaaaaggcaaaataagtcatcaaaaaatgcaccaggtagaaattacctgatgcattttattttatccaattttttacttggcgaattgttcaccagctaagttacggtagaagttagccttagcttgacggtaatatgggttaacccacaataaaccgatcccgcaggaaataataccaagtagccaccagccgatgaaacttaaatcaaaaataaacaagtccatcttatggccatccatcaacttacggctggcactgatagcttctgtggcagtcggctcatgaccactatctagcatgtcacgcaagatatatggtgtcactgcatatgaataagccttgatcagccctggaataatcagtaaccaagtccacaaaataagaaaaatttcatataaaatataagttaaaaagttactcttaaagtttctggtaaatggactaaagatacctgaaagaacattttccttagtaccactatctctaaaatgcaagatagtataaattacgccccatgtgattaagccaattgcaactgaaactaccaaagtaatcagccatgcaaaaggattaactcttactttatctaggtacatcaattcagcattgttaccgaagcggcggacaataccgtacacgatatcttcgcccttttcaaaaaagttttcgatatcggtcaaaatataaacgattagccagccaacaaatgacagcaaaactgcccagccccagttaccacgtaactggtctctagcttgttcttttaattcttttcttgtagtagccattttctctcctcctcacttttctaatcatgagtattgtcgcctaaaatcagggcagaatcaattaaaagcacatcaaaaaagcctaattccaccaacatcggaactaggctcacacagtgttgaccgccactctgaccacatatagaagataacattttcgctaccggagaaaatgactactaatagcgacggtacatgatagattttagcattcaactacctaaaagacaagcgaaaagacgtgttgaattagcggaatggataccaaaatttacggataaaaaagacgaggtctaaacctcgtcttcttcattactaaaattcaagcatcatcgtcattgcacgattgatcttctttttaatctttttaaactcaccagaagcagtatgattatcctgcaaaatgatcatgttctggccatctttagttgcccgcataaaggtataatacccttcaccagcaccattagcagctttataatgctttaaattataaagtccaccattataatagctaggagcctgacccttgaacagaacttttctactcttgttagtcaaaatcttaccagcaagaatatactgcatggtcttagctaaatctgcgttagacattacgattgaaccagcacccagctcattgtgagcatccttaacggctttagcatggttcactttgacatattcaccctcacgcatttcatagcctggtacccaatgactagccaataacttagccttgtctgaccacaagaactcactatgggttagcttcagtggcttgatatatgtgtcatggaacaattgctcgtatgactttttctcaagcttggacaagattccacaaaggaaaatatagtttactgaagtatagtgccacttacctaatttgctagcatcaaacacagtatattgtgcatcatgcttgatgttcgcttcatcagagataaactcaggcgtacctaattgttgaccagctttcaaatccagccctgatgtcatatcaattaagttgctaatcttgactgaactagcaccatctacatttgggtagaattttgaaagtttatcgctaagcttcaactttcctttctctacctcatgcatcaccattgcagctgtcattgacttttgaactgaattgatcaaatagctagtgtcaggtttattgtccgtcgcataattaagcaaaactttgccatgatttattactaaaactgagcctttaacgcccacatggtcaatagcctggcgcactattccgcttttaaacggtctttattgcttaaatcaactcgtttaacgttatccttgttttgccacttcttggagtagaagtagttagacatatcatagtcataacgcttattaggttccttcatgaatggacgaacagcttgatcaactgcaacccagcctttccagcctaggtgaatagtatcttgcataaagtacttttcattgcctcgtcttgaaagatctgcaatattttcaaagccttgactggttaactggtgttccatcttagcaacagactcttggtacatcttgctagataaaccagtgtacttcatccacttgccattaattggtgggatgataaatagcacattagtgtgttgcttagcaaactgctccaacatcaattggagatcaccatattctactgaatgtacatagtcaaaatcacgctgactacccttcaagcgtttcaataccttctttggtaaacgtgttctaaagaaggtattatcaatacctaagttgtttgagttagtgtgtatagcagcttgctctgctgcaaccttattcaaagcagctacagaatacttgttaggtaaaaccttagctctcttttgaatcttatttacacgatcacgcaattggaatgagctgaagaaattatcttcgttacgcaacattcgacgacgattttgtaaataaaatttttggaagctagtcaacttcttgccttgagcaatttgcttaaggctattcttgatctcgccctttacatttggcatttccaacagacgtttagctgcataacgatcagttttattattcttggcactaagcaagaaattacatgcttgcaatggtgaataatacaatgcaaaggcattaggatcttgaccccgcttagtaaaccattgtggtgaaatgatcacaacagccttcttgtttctaagctgcttagctgttccttgcatccccaagaactgagccaaagattgactacccggtccacctaataagaatggacggtagtttctatgatacttttccgcaattacactagggtgaagtgggtcgaatcttgacaactcacttgaaccatagaatggcacgtagccatcttcaaaagcttcctgcttcattgtgctgcccttgaagacagttgtgttttgtgaagctgcagcctcgtaaatcgtttgcttagaaaaagttctttcccaaggaataaggaaaacaactaacaaaaggataaaagcgcaaagaactgggccaaagatttgccacagccggcgtttattactcattttctaagctttccacctttgccacaatcttgtttggagtgtcccattcttcacggttaaattctgaaacaggaacatcaatatcaaacttttcttgcaagttcaaaagcatttgtacacttgccattgagtccatcaaaccattgtcaaagatgttttcatccatttggtctgataaatcttcaccagttaagtcatttaaaatatctaatacgccttgttttgtatccataattaatacctctcaaaaaacaactcaatacttattctacttccagccgaaccacagttgacttaggaaccctgagaaaatcaagaaactgaaacatactacattgaaggttaagaaaatggcgaaccatttagtaaacttgttagatggaatttgcttcttatgctttctcttgaatctaagccacatatcgttgatacaaatagctgaagcatggaagataccataaacaatataataccacgttaagccatgccagaaacccatgattaagaacaacaggaagtaagaaacttgtgataatctaattcgattcttaaacattttcttcttcattgcaaagaaagtgaatcgcatgtagatgtaatcacggaaccagaatgataaagtaatgtgccaacggttccaaaaatccttaatgttcttagaaataaatggcttgttaaagttcattggtgtatgaattcccataaagtatgagattgatacagcaaacaatgagtaacctgcaaagtcaaagaacaggtacatactgtggcaatacatgtaagctacaagccaccatgatagcttcaagccgccatttgcattaccaacggctaaagcagcagcactgatctttggtaacaaataagtgccaaagaaccaaccaatcacaaatttgtataaaaagccttggaataagtatctaacagcatactgcatatctgtaatgtatgcatcacgcgtaggtaccttatcataatcttttttaaatctgcggtaacgatcaataggacctgacgaaatagttgggaagaaaagcaagaatcttgcgtaagtaacaggatctactttcttaattgccccatcacgcatttccataataacttgtactgtcttaaaggttacgtatgagattcccaagaaaccaatgacaaagccaattgagttatcaggaaaagcggtcaaatatttaactgcggctaatggaataattgccaaaatcacagccaaactaaagatccaagtcttatttttaccgtggtgacgataatactgataagcaaaggttaaggcaaattcgtaaaccaaccagattaataggttaaccccttgctcccagtgatcaccatcaaaaatcaagaacaagaaaacaattgaaaaaattgcttcatatgtcttgagtcgatgaccgtaatatagcccaatgataattggaattaaagcgatcatcaaatagatgaaatattgcggattagaataaggctgtaagttaatgaaattaaaattcactacttattaacctccttaattaccgccttaatatctaccttaccattttgtgaaataggtaatgcatcttggtagatgtaacgctgtggaatcatgtaaggcattatattcttagctaagtcttcacgaatcatcttagttaaagcagcttcagaatactgacgacgaacgccttcttttaattcgatttcggcaacgatctgcttaacagtgtggtccttattgtacttaggagcagcaacgccataacggacaagcttgttcttagttaagtagaaattgatttcttcaagttcgattctgtaaccattgaacttgatttggaagtcaattcgaccgcgataaaatagcatatcgccatcaaagaaaccagcatccccactccggtagctacgatactcagcaccatcttcatggaaaaaggcagcttcggtcttttcaggattgttcatatatcctttagaaacactaggaccactaatgataatttcaccttcgccaggcttatcacccttagaagtatcaattgtaatcttagtgtcttcttttaccttaccgattggcaaacggtcatactttttaagaacttcatcagtaatttcaacttgagtaacagcaactgttgtttcagttggaccataggtgttgaaaatatgactatctgggaacttcttcttaagcatctcagcttcactgtgtggcaattcttcaccacagaacaagaaatgacttaagtctggatggtgttctgcatcaaaagtcttgtccaagaagcacatctgtgcaaatgacggagttgatacccaaacattgaactgcatctttggcaaagtttggaataatttaccaaagttttgagtaacatcatgaggcaaaactaccaacttaccagcagaaacaagtgctggataaagactcattactgacaaatcaaatgagtaaggtgcttgtgccaagaaacttggatgttctggcaaattaaagtctgacaactcccagttaacgaaactaagcaaattgtcgtgactaatttgtacacccttaggtttaccagttgtacctgaagtaaagataatgtagtagttctcatcaccttcaacgaagttcttctcgtcaacttcaaaattgtcgtcttcaacttcgctagccttaagaaccttaacatcagttaaatcaacttctggtaacggatcaatttccaaaactagtggtgacttagaaacgtcttgaatcatcgttaaacgttctgcgttagaatagctagcaattggaatataagcgtgacctgacttaacacaaccaagaaaactagcaatcatttcaaaagtttgtccgccccaaatcataattggagcatgctctggaatatctaagctagcaattttatgtgcccacgcatttgaacgctttttaaggtcaccatatgtattagtttcaccgagatagtcgtaaacaacacgatctggttcgtttgcggcgatctcatcaattttcttaataacatcttgaatcatgtgatagcacctaccttaaaattcattataaatgaagtgaacagatgttagtccactatattcatataaatagataagagccatcaggattccgaaataaacaattgttttcaaaacaaacataccaatacgtctgcctcgagaatcaaccttcgtctttttattcattttttctcctttaggtaatcttacttttgcctttgccctatattactacaaatagtggcaacaaacgcactaacggcttatattttaacaaatttaaactttttcttaaatcttcagttatttgtttcaaattgcgaatgcgttttctttactgttgtctcttgcaatcccgataagcaaaaaataatggaataaagataactattgccacaaaaatcaaagcaaagatcattaagcgccatacattctgtggtttagtccacattttactctttgccgtcgccaacaaaaatgccgcaaataaagcaataacaattacttcaaccaggcaaaaaattaaatgagtattttgccagagatataagtaggttgttgccggaaataaacaaaaccaccctgaaaagcgtaaaagaaagatttcttttttacgataatctactttcattatagtttcctttcctcattaactgccaaataacgcattaatattcaccgacaaaatccggtccataactacaatttctggtctggcgtagatcttagagcctgattcaaacacacatagtagttgtcccttataagcggtaatttgctctaaatatggcggcatggtaattaccagttctgcattcttttcgtctaaagcatttaaagctgaagttggaaaaacgtagagcttggaatcaccactaccataagattggctcaaaaaaattttattttggtaaattgcaattccttgaatttgcttatccattgaagtttcgccagttggatcggaccattgcagcgttccggtaacagatttaacttcattattagtaattgagccacgatttttaccactacgcgctatagtgtaagccgcaacttttcctcgaccatacatgttaaaaaagccaacaaacaattgaccatcataatatgtaacggtcgatgctttttcaactgcaggaatggcaatttgatatttatacttaattggtatttggctgccctctttataggcccttaattctgccattgaaaatgctgctagcgctgaagatttgcccattgagccagttatccagatatttttggctactggatcataagcaatcccacctaggtgtggccgaccaggtatttgaatcgttttaagatatttgcctgtcttcttatctaagacataaacaaccgaagcatgctcatgttcaccatcataagcagttagcaaaatatacttacctgcaaccgtaatcccctgtggtgtcattgcagttgctgtattgacctttttagttttaaaatcataacttttagtagcaactaatcccggcaaaacaaagtcttttccatcccacgtccgcggtggtacataattggcaactttattaataaaaggatatttttcacgcaatgctttttggtaattggcaaaattatgccaagcaggactagtgcttgtcccatccttagcaattttttcttttggccgttgacggatcatctcctgcttctgccaccattggtaaccgaaatagcctcctgcaccaatccctgcaagcaaaagcagtactagcaggaagcgcaaaattcttttaccaatttttttcaaaaaattactcccttctgtttaggaattgtccctattatgcaattcattataacgaaaaaacaattactttttgtttttaactccttgctataagctttatttactaaaaagataaatttttttgcaaaaaagtgctttcgtcacacttttttcacaaattaaggttatactagtaaatgtagtgaggaagaataatcctctactacaactcaacttttttgtttttcattcatactcctccaagtaaataatgaaaataaaaagaattgacttactccaattagtcaatttcatatctatccctttcggctcacgtgcgttgcgtgagcttttcttataccttaacttattctcaagcaaatctttaccttttcataataaattgaacacttttacttcacatttacccagtattatataaaccgtagcaagatggtagaaacttgctacaatactcccacttttttatttcattcattcttactcctccaaagtagatgaaactaatagtgtctgggaaaaaactagcttccagatgaataaaaacgatcaagatttccttttttaagaatcttgatcgtttttttgttctctttaaaatttttaacaataaaaatcggcccttcagccaccttctttgacaatatttgttcaaattcatcatcataaaggcaattccgatatcggtttcgaccttctctttacctcgcaggtgcgttctgcgcatgccaaatacgttcttcaaatgtccgaaaactggctctacatcatattttctcatgccatagatgtgtctgccttcttcgctttggagaacttcttttgctttttcttttaaatattgccagttaggattatagcgaacttggcgctggcggccgctagctgttttagccaattgttccaattctggcgttagctggaactcgtctgcctcataaaccttaaaatcacggacctgaccagtagaacgatccttgcgctggctgtaatatttgaaattgaatctgacgccatgatgatcaatgtaataatcatctttttcattgtagtaccagttgattagcttagttggatcattcttatactttttggtctgttctttttcatacatagtgtagggaataaagtacttcttgtctggatatttttcctccagcatcgaataattgtattcactgccatagccagcatcggcgacgattttgtcaaacttgtccaacacggtcatttgatccaaaaccggctccaaagttttgaaatctgtcggattaggaaagatggcataatcaactacatattgatcggtcgtgactgcttgaatattgtagccaggctttaattgaccatttttcatgtggtcttccttcatatgcataaaggtggcgtcatgatctgttttggaataactgttgcgtccggcaaagatctcttcggcttcttcatatttttgcattcttggcacataatcttttcttagccggtgcagaatcttttttagtccacgtcgcttggcttttcgaggtgaaccgccaggaatggctttgttttcctgctcaatctctttagtcagcttgttaatttctgcttcagtttcttgagctaattcctttagcccctgactagtttgaactttttctttttccatttctttgactacttctttagtaatcaattcatcataaagttcaactgcctggcctttcagcttttcatgatacttttcaaccgctttgcgccagacaaatgtatagcggttagcatcagcttcaatcttagtaccatcgataaaagcagcaccttcattgattaagccttcatcttctaacaggttagtgaagtagataaagctctttttaatcagttcattggcatggctgcttgatctaaaattattgatagtatgatatgaaatcttttgctggtcagccaagatcatcattggcagattttcttccagcatcaactcaatctttctgccagaaaaaactcttctggagtaagcaaaaagcagtattttgagcatcatggctggatgataggctgggcggcccgttttagcagtcttgcctactaaaacatcttctggaattgaatctacaaaccagctgatgacattagccaaatgattggccggaatggcaaaatctagattaagtgttaaagcagtttgacctgtgatataattcttgtacatgttagtttccaccttttttattttgtgatgatttaataatatcaaggctggagctaaaagtatacaaaaagagcgttgaaacaaaaattcaacgttcttttttcatgatctgagacttagttttttcccagacactttcctttttcagcacttttttctgtataattaaggtagaaatgaggtgccgctatgttttcaccatcaatcaaacatttaatagaagaaaaatctggttcatttttaatccctgctagccgaattgcctttgtccaagcagacaatcctctttatcatgcctttttgattttgactaaggttaaatattcaaaaattccagttttagataaagaaaaacgagtcgttggcctgcttagtttggaaatgattacggacaagatgctgacgactgatgagatctccactgcccctttagataaattaaaggtcgaagatgtaatgcaaactaagtttgataaaataaacttcgttgaaaccaccctagaaacgcaactgcatctgttaatcaataatgctttcttgcccgttgttgatgatcgcggcgtgtttcagggactacttactagacgcgaatggattaaggcatttaactatgtagttcacacttatgacaaacactacgaaacaaaacgaataaaataacctccaagcagcctttaaggctgctttttttaactccaacatttattgagcaaaaatgtgtccagaccaataaagaatgttagaattaagcggtagacagatatgtttgtattttggggagggcaattatgaaaaatttaaaacgtcaatggaagtttattgtcgttttgattgctggtgcagttggattaattagccaatttgcattgcattcaaagagcctattctcaatcgggaatcttcaatttccagttcatgccatcattattgatatcattggtatcttgatggcaatttctttactattggaaattttccacgattggaagacaggccgttacggcgtagacatcctggctgttatcgctgttgtttctaccatattgattggtgatgtatgggctgaatggatgattttggtaatgatgaccggtggtgaaacgctggaagattacgcaactggtcaagccaacaaggaattacgtgccttgcttgataaaacgccacgtatcgccaacaagttagttgacgggaagatcaccgaagttaaggttgatgacctgcaggtcggtgatactgttttgatcaagccaggtcaacaagttcctgtcgatggtcaaatcgttaagggcacttcaagcttcgaccaatcttcattaactggtgaatcagttcctgtgaccaagaaccctggcgacgaattaatgtccggttcagtgaacggtgatgtagcggtagagatgaaggtaactaaggctgctaaggactcagaatatcagtctattgttgcgttagttaagtcttcacaagctcaacctgctaagttcgttaagatggctgaccgttacgccattccgtttaccgttatatctttaattattggtggtgtcgcttgggctgtgtctggggatgcaactcgctttgcggaagttatggttgttgcttctccatgtccactgttgatcgctgctcctgttgctttggtatcagggatgagttcaatgtcagctcaccatattattgttaagtctggtccaaccctagagaagttggctcgcgctaagacctttgcttttgataagactggtactttgactgaaaaccaattgatcgttgaccaagtcgttactgatgacaaatcatttgatcaaaaagaattgcaaagcttagctgccagtgttgaacaacagtcaagtcacgttatcgctagttctctagttaaggctactgacaaggatttaattcatcccgtaactaaccttaaggaaactaccgctcaaggtgttgaaggtgatgttgatggcaaacacgttaaagttggtaagttatcctttgttgcgccaggtcatgaaaaattaaacgtcacttcaactgctgtttacgtttcagttgacggtaagtttgctggttacatcactttgaaagataagatgcgtccagagagtcctaagactattgaacgtcttcgtcgtcaaggtgcagaagatatcatgatgcttaccggtgaccacaagcaagtcgcagaaaaggttgccaaagaagccggcattactgatgtccgctcagaacttttgccatcacaaaagattcaagctattaaagatgtgccaaagcacctacgtcctgtcgttataactggtgatggtgttaacgatgcacctagtctgaccgctgctgatgttggtattgctatgggtgctaagggtgctactgctgccagtgaaagtgccgatgctgttatcatggttaacgatatttctaaagttaacgatgcagtcgctatttctaaacacacaatgaaggttgctaatatcgatgttttaactgcaattggtgtcgttattatcattgaattgattgccttcactggtgttatcccagccttctggggcgctattttgcaagaagtagtcgacatgattacgatcagcttaggtttacttgctaagactaagccaagtgataagcaatttggtttggaagaaaaatagattagatgtgaagaagctccagaatcgatttggttctggagccttttttcatacataattatgcgtagcactgcaccagttcaatttgcatctaagttaaaaaactattaagattaaactcaactaaataatttttagtggttgggtttttatcacaataaaaactttcaagattcgcttctttgggtcaggaagcacttgaaagttttttgtttttttacagaaggggaaaatatgcattttttaggacaacttatcttaatcctcttaactacagttttgctggggcaattattcgcccgcttcaatatgcctgcagttattggacaactattatcaggaattttactgggaccagctatcttaaattgggttaagccaaatgatatcatcagtctattctccgagttcggggttattctgctgatgttcttagctgggcttgagagcgatctagatttattaaaaaaatacttcaagctaagctttactgtcgccacagtcggcgttatcctacccgttgttttcatgggcttagccagttacttctttggcatgcgccctcttgaagcactctttatcgggattgtctttgcagcaactagcgtttctatctccgttgtggtgctgcaagaagcacaccaactgcacacccgtgccggcacagccattttaggtgctgccgtagttgacgatatcttagccgtggttgttctgagtctattcactacattcagtcatgaaggtggcaagagcggcttaactaataactttttgcttaatatcttgattgaagtagtttacttcgtagttgtttggctgatttttaaatttgttgcgccatactttatgaaagcttctgaaaaaatcgacgttgactattccgtcgttatcggttcattggttttagccttaaccatggcttgggccgctgattttgttggtctttcagctgttgttggtgcatttttcggtggtttagcaattcgtcaaacaccacaatacaaagaagttcactcctctgtttccgcaatcggctactctgtcttcatccccgtcttcttcgctgatatcggtctttcaatgacttttgccagctttttcaaggatatctggttcattatcgttatgaccgttttagctattttatcaaaattctgggccggaaaatactccagcgaaatctttggcttcaataagaatgaaggcaatatcgtcggtgctggaatggtatcacgtggtgaagttgcactgattgtagcgcaaatcggaattaaccaccatctcttccctgaggatatttattcaagtctgatcctagtaattatcgttacaacagttatttcaccatttattttgaattactttattaaaaagagtcaaaatagtacggaatttatgtagaaaaagtctagcattcgctagattttttaatagtttaattttacaagtggcttatcataaacgcaattgtgtctacatggtaaaatcaatagtgagaggtgagaaatatgttacaaactccaaacaatattagagctgttaccgctcgtgacctgcgcaataattttaagaaaattgctgatgatattaatgactatgatactaccgttatagtagctcgtcccaaagataaaaatgttgtgattatttctcaaaaagaatatgattcatggcaagaaacttcatatcttctaggaactaaagctaaccgcgatgcattagctgaagctaaacaatcatttgaaaaccaagatcaacgaaataaagttttaaccccagaagaattcgaggctttaactaaagatgacgaagcttaaccttaattttaactacaatgcctggaatgaatatcttgaatggaaaaaagaggataagaagacttcccaaaagattgataattttattaaagaatgccaacgccatccttttactggaaaagggaaacctgagccattaaaagcgaatttaagtggtgcatggtctcgacaaagtaatcataaagatcgcatggtttattcagttaccacaacagaattacaaatatggcagttaaaataccattattccaaatgaaaaagctctttcgagcttttttgtttaacccaattttcctaaatcgattacttggtcatacttctgcaactcatttgattcatagtggtgaattacttcaataaaggtaaggtttgagtttaacaagtaattatgaatttgatctgatgtcttcttatcaagggatgcattaatttcatctagtagcaaaatcgatctatcggccaaaattgcccgtgctagttctattctagctagctgtcccccagacaattgatccgcattatcacccaaggaatagtcccagcccttttcagcaataatttgatccaaacctaatttttggcacacctcgctcaccttttcccgggaaatatttgcacctaaagttaaattaaaccacaaggtatcggcaaaaattactggggactggctagcataagcgaataaatctgtaaacgagcctggcttttgctttttgtcgttaagcaatatttccttggcatgaccatgctttccggttaataggaattgtaataacgttgatttacctacaccagatggtccaataactgcaactttttgaccttttacaactgcaaagttaatttgattagctaattccttgccttttctagtaagatccagatcttctatttgcaaatttgcaaaattataattggtctctttcttttcaaccttgcccttggcaatatatttttctgccttagcgacaattttcttagttgttgataatttgtttcgatcttctaaaatagtcaaaattggattaagaaatgaatttgacagttgaacgattgcaaataaggcacctaaagtagtttgacccttaaccaccatgtaaattcccactaagaatggggttaagaacgtaaataaactagcaatcaagttaatccaagaattagtatctagattgagtaagttcattttacgcaaagcatcttctaattgattgatcaaaacttgatttttcttaaccgcattatcgcgcttgttgtataaatttaatgttgtgctaccagccagaaagtttttaatatgactaacatatttatcattagcagttgtccaattttctgctgcagtttgaatcttcttttgaaataaattagaaaccagcatcggcaaacatgaaccgattaaaaataataatgtaactaaccaattaacacataaagcataccctagcgcaaaaacaatcatataggcctgcatcattatttcaatttcagcatcaaaacgattagtttccagcagcttaaaatctgtagtcaaaaagcctaagctagcagtattttcttcgctagtctgacccagcatcccctttaaaatgccagctcgcagcgtcgtattagtctcttgaatagcacttgtttttaaccgattgaaaatcagcgaagcaataaaagtcgcaataaacgccccaataacaataactagaaattgtgctaaatcgccaaaccttctttgcgtaccaacattggtcaatgtctgtaccatatatgcaaaaatgatttgttgtgtactagcaatcaagcctaaaatagttaacataatgaattttgcatgtgaagaatatttgtaaatcattttttgtcctcctgtattttacttgaggctagtatcgcaggataatgacgaaaaatgttagaaatttacagatctgcaaatcgaggtaaaacattatgttcaaatatggttcaatttacaaacaattgcgcaaagatcaagaaatcactcaaactgaagcctgcaagggtatttgttcaatctctaagttatcacgctgggaaaataatcaggtagaagttgagtttagcaccgccattgcattactcaggcgcatcaacattacgcttgacgaattcacgcattacgctgcaatgaaaacagaatttacattgccagacgacattataacggccattaaagacaatgatacaaaggtactcgaaaaatttgttcaggagcagctaaatcattatcacgccaacaaaaatattctcgaactcaaaaacatcattcttgtctgcaatcaattatttctcatgactggtaaaaactatctaacacctgcagacattaatcgaatcggttcatacctgcttcacaacaccgtttggtctaaatacaatatcttgctttttgctaactcaccgtttttgctaaattctaaaatcggctatcaaattgctctgcgaattattcacaattttcaccctacagaaagtttaaacgaaaatactactattttcatgggcggtttatctgatacagttattgccttagttttcaaaaagaagctagattacgctcaaaaaattcttaatgaattaaaaaagataggacttcccttctatctcatgttctttagttcaacattgacccttttacaaaaaattatcgactactgccacactctcaacgcacagcctgtattggcaatgattgatgccatagttcagctaaattgcatggaagttgctaaaaaatggcttgagatttttaaagacgtacaacaaatctggccagaaaaagaaaattaaaaaccgtaaaagtaatttactttcacggcttttgacatggtattcattatgcaagcttacaaatttttagcttttaattaatccttaacaacgtctttggtgttcaaccattgactcttgttgatcttaacgatcttcttgccagcagctttcttaacatccttagcggtgtaagttgaacccattgaaaccttttggctagtcttgtgaccttgtgcgtccaaaacattaactttttggttcttagtgtcctttacagcaacaaagatcttgtcaccctttttaattgcaggatcagttggcatagtttcggcaacacctaactttggagcagtaaaactagctgcttgactaactgaagcaccaacacccattaaactcattgaagcaactgcgattgaaacaactttaactaaattctttgaaactaacataatgaatacctctaatttctatatcacttaatttgttggaactttttgttccctcattccttacgtctttattgtataacatatgttattaattacaaggggtttatcgaattttttaaaaataattcagtcgtctcaaagtattgctataataacgattgcggggattttttgtccaaaagcattaaaaaagtgtctgagaaaccgttctttcccaaacacttttttaagcagctgctacttcgtttgaattttgagtcacttttctagtttttaaactgacaaaaatcgctacaattagtgttattacctggattactaataatgtaaccaaagcaacagtaacattgaatgaaccagaaattgtggttaatactgttgtcataattggagcaacagccattaagattgtatttaataagccaacagttgaagccaagattttatgatcaactgatgttactagccattgctccattttaactgaagcaactcctgcaatagctgccaagaaaaacattgttatcataattacgtaagtatttcctaggaaaatgcttgttgtagtaacaatacttaaactggcagaaataattactaaactaaaaactgttaattttttgaataattgtggtccaaacattgaacccaatgcaaagcctgcgccaataaccacaccaaacaaagcaatagtaaagctataagtgccgattagcatagttgaacgatgagctgcaagtacaattgttgtcaatggagtaattgtatctaaagctccatttaataatgcgattactaataccacagtcaataatcctgattgtttcttcacttgggtcaatgaagttttcattgtttggaaaaagttttgatcattaacttcctttttttcaagtggcttctgatccttctgatgttttaagccaacactggcaaataacaaacctgctaacaagaaagtacctgcattaacaaaggctaaagttgagtatgacattactagcaaaagtgctgaaccaatgaattgagcacccatactaataatttgatttacgccgccattaaagcctactgcattcccgtattcttttttaccaacaatatcaacaattaatggtgcaaccaagccacctgaatatgaaccaatagtatctgataagaaattcacaacaacgatgattaaaaccaaattccactgtgacattttagtgataaacaataatcctactaaaccatataagataaatcggacaaatgctgctaaaaagatattgcgaaactttttcttagtcttatcagcaaggtaaccaccaaagatctcgaataattttggaactgattcagaaattgcaattaatgaaagtgctaatgagtagttttgtaatttgctagcataagtcatgaaagccaagtagaaaagaatatcgcctgcgcctgaaagaaaactagctactgaaaatcttctaaagtctgcgtttttaagaaatacgttcataaatcttaccccctttttctttgtttcgtttgttgttgaaattataataaagtgaaaaagaaattaattttaaaaatggcgtattcgacattcggaggataaacctatgacaattggtgaattactcaaagaaaaaagactagcagaaaacaaaactcaaaaagcatgggttggtcatattatcagtacttcttattatgctaaagttgaaaagaatattcatagaattacagcagaggatttattagccattcttaaacataatgatctttcaattactgactttttcgaagaattagcagacaaaaaggatgaactaaaagcacaagtaaactcgctaaataaaacagtaattgatgctgtttatcattctgatgtttccaaagttaatgaagtcattcaaattattaaaaaaatggatctaccgactaagcaaaaacaagaacttatcttaatcaataaggggtttatcgaaactatcaaaaatgatctaagtgacaattatcagccagataaaaacatcgttcaacaactaaaagacaaaatttttagtattcctaattttaatagattcaaacttgaactctatactaatttcatgcaattttatgattatacaactaatattatgatcaccaaacaagtgatccataaaatagatcagtttaagagcgataaagagttattagcaatcgctggtattctattcaatctcctttcacaattagtcgaagaacatcattatcaagaaactgcaccatttatagcagctagtgagcatttaccctttttaccagacttatactttcctcaaaccggaatctcattgctaaaataccttattagttatcattttaataaaaaaacagcagacttagctaaagctgagatgattgcacaaacttatcaaattactggtctagaagactttggtaaaggtgcacaagaaattattaatgaagttaaagaggactagctttaagctaatcctcttgtttcaatctctaaataaaacctaacgcgttatagcacatgtgcaccaaaattgaatagcgcaaatctttggttgacatatagacccaagctaaaaccatgcctaagacccaatatactaagatatacttacttaatgccggatcatgcatatagccaaataaaaatccgcttgcaacaatacctagccacttatttctagtatttttcttagtgaaaaagatattgaaaaacatccctctaaagatatgttcctcacaaaatggcgcgatgaaaactactaggatcctaaataaacctgcattgtattccgctattttattcaagctttcctggttctttgaaacgccgccaccaactagattaagcatcacaatcgaacctactacaatcagtacaaaaccgatcatcgctattccgattctgcgccagtcccagtgtggtgtttcatcaaagccccaatcattttcttcttttaattgcctgcgataaatataggaaattgcaaacaaaactattaccgtagcaagcgccgtaacgaagacgcgatattgcgccaaatcaaatcgctgaggtctaaagtaaagtacttctaattcagaataaattaccaaagccaacacagcccctgcaatatttcccaggtaatgtccaaatctcttcatttttcattcacaccttgattctttcaactagtaatcattgtttctattataatgtaaataagaaaaaatacctaaggaggagtatctatctatgcttaatcagatcatcgcttttttggggagacgcggtgagttcttcgacatttcagtctttatgttactgatattttttgcctttttaatctcttggcttatcgaaccaagacgtttgattaatggcgttttgtttactatctttatagtctcaatgctctcttggatcaccgttatggtgcacaaaagtacgagtcacggcttgcaacgtgcctatgacctactagttctagctgcattatttggcattgtcttattattaattttcgcctggatttttctattctggaatgcctatttcgtttggaaatatgaaagccatactttgcctaacttgcttactttaattaccggatttttagcattaattattagtattatcgtgctcttaggaccaggtaagtacttgccacgttggcttagtctcgcattagcttcaattcccgcgattgcaatttatttgggattggtgctttacaactttttggtaaacttgcttctatatcaaatttatcctcgtacctaccaccaagactatttaatcgttctagggtctgggctaatcaatggcgaccaagtatcaaaactgcttgcggctagaattaatcgggcaattcaatactctaaccgccagtatcaaaagggccgcaagcgccctatcctgatcatgtcaggtggtcaaggcgctgacgaaaaaatctctgaagcactcgctatgtctcgttttgcacaacggcgtggcgttagtgttgaccgtatcttattagaagatcaatcgaaaaacacatacgaaaacatgctcttttctaagcgtattgccacaaaagattttggtaattcccacttcagggcacgcttctttagcaataattaccatatttttagagctgctctcttggctaaggaagttggtttaaaagccaatggtgtcggtgcttacaccagattctactacttgcctaacgcaattatccgcgaatttgccggtgtgtttgtcatgcataaacgccgtcatttcgttatcatgggattaatcgttttattctttatcctgcaagctatcttagtcatgacaggattagaaagatttactgtaatttagaaaagagggatgcaatgcttcaactaaagcatatttttaagtcatataaggtgggggacaacatcacccacgctttagacgacgttacaatctcgttccgtgaccaggaattcgtcgctatcttaggtcctagtggttctggaaaaactaccatgttaaacgtaattggcggacttgaccgttacgaccaaggtgacttgatcatcaacggcaaatctaccaagaattttaaagagaccgactgggatgcttaccgcaacaataccgttggttttgtttttcaaaattataatctaatcccccacttgtcgatcatcgccaatgtggaactagggatgaatttgtctggtgtgcctaaaaaacagcgccatgaaaaagcaattgcggcgttaacagaagtgggattgaaagaccatctaaataaacgtcctaaccagttgtctggcggtcagatgcaacgagtagcgattgctcgagcaattgccaacgaccctgatattctactttgtgatgaaccaactggtgcacttgatactgagacttctgtccaaattatgaagttgatcaaaaaactatctaaagatcgactcgttattatggtgacccacaatcctgaattagctaaagaatacgccacaagaatcgttaatttccaagacggtaagattcgtcatgattctgatccttttagccctaataaggaagaagacaaatttaacctcaagcgtaccaagatgtcttactggaacgccatcaagttgagtttcaccaatattatgacaaaaaaaggtcgaactctgctaactgcttttgcttcaagcatcgggattatctcaattgccgtagttttagctatctctaatggttttcaaaagcaaatcaataccacaatgagcaaagctttagcaaaatatccgatttctatttcacagaccgcaactgacattacttcagctaatgcacgtaaagaatcggataaaaatgtcaaaaaccgcggctatgtaacggcagaacaagaccaaagcgaacaggcccaacacgttaataaaattagcacaaagtatgttaactacatcaagaagatcaatcctaattatgccaataacgtgtcttaccaacgcggcgtaagcttgaatttattagctaaaaacaagggaaaaattgaacgcgtgcaattttcaaatacggatcctgatcagactaattctgttctagctgctagatcccaagcgatgagttcaatgggactgggttcaagtgtctttcccactactttaaataaagagaaagactcatttttgaagcaaaactatcaattgctctcaggcacttggcctactaaggcaaccgacttggttttagttactgacaataaaaatactgttaacatcaatgccttaaaaaatcttggtttcgatttaaagaataaggaacacgtcaaattcggccaattagtaaataagcaatttcgtgtagttgctaacaatgattactatcagcaattgccaactggcatgtttattcctaaaaaggtaaataacgccatgtataacggtgctcaaaccaagctaaagattgctggtgtcattcgtcctaaaaacgaagattcaatggccttgttatcaactggaattgcttatagcgatcaactttcacaacgcgtgattaatgaaaataaaaactctgcaattgtaaaggcacaaaagaagagtaaccatagcgtattaactaaccaaaaactaaatgccaatgaaaagaaagctacaatgcagactcttggcggtaccagcatccctactggtatcatgatttatcccaacaattttgatgataaagataaagtacttgattatcttgacaaatggaacaaggggaagaaaaaatcagacaagattctctatactgacatgtcaaacgctgttaccacaatgactggcggcctcttaagcgggataacgaccatccttgtcgcatttgctggtatttcattaatcacatctatgattatgattggtattttaacttatacctcagtacttgagcgaactaaagaaatcggggtactcaaggcattaggtgcccgtaaaaaagacattactcgtgtctttgatgccgaaaccttcatcctaggtgttttctctggtgtattaggcattctgattgcttacctactaacattcccaattaacagtatcatttacaagattactgatctggcaaatgtagcccaactagatcctactgctgctattgttttgatcattatttcaactatcctcaccctcttaggtggtcatattccagcacgaatggctgcaaagaaagatgctgcaattgcattgcggagtgaatgaatttaataaagaatttgttacgttgttcacaataacctaaatttttagcaaaatatgtggtatcttagctttagcaaaaacaagtaagaaaggaacttttttcaccatgactgttaaaaaattagaaaataacagcgatgttaatgtagtggcagaagaaagcaaagttttaactgatttattgaatgaatcaactaagcaagtaatcggtcaagcagctttcgataagatccaaaacttaattaaaatctctgccgccaaagattatcaagaacttgaaaagcaaattgctagtcttaacaatcgcgaaatgattgttgttgcacgttattttgctactctcccactcttgatcaacatttcagaggatgtagaactagcaagtaaagttaatgtgcttaacaatactcatcaagattatctaggtaaattgagtgacacaattgacattgtagcccaaaagaaaaatgccgaagaaatccttgaacatgtaaatgtagtacccgttttaactgcccatcctactcaggtacaaagaaaaaccattttggaattaaccgatcaaattcatcaacttttgcgcaattatcgtgatgtgaagaatggcacaattgatcgcgatgaatggactgaacaaatgcgggcttgcattgaaattttgatgcaaactgacattattcgtggtcacaaattaaaggtagctaatgaaattaccaatgttttggcttactaccctaaggctttaatccctgcaatcaccaaatttactagtcgttacaaggaattagctaaaaaacacgggctaaacgctagtcatgctacgccaattaccatgggaatgtggatcggcggcgaccgtgacggtaacccttatgtaacggctgatacgctagaactaagcgctactttgcaaagccaagtaatctttgaatattacattaagcaaatcaataagctttatagagccatttccatgtctacttcttatatggagccatctgacgatgtaatgcacctatctgagctttctaatgatgattcaccattcagaactaacgagccatatagacgggcattctactatattcaaagccgtttagtgcacactgaacaaaaattactgaatattactaacaagaacactttcttaaagaaacgtgacctccaaaatcttgataaaatcccttgttatcaaaatgctcaagaatttaaagccgacttagaaatcatcaaaaattcacttgaagaagaccatgatcacgccgtagtagacagctactttactcaaattcttgaggctatcaacatcttcggcttccatctagctacaattgatatgcgtcaagattctagcgttaacgaggcctgtgtcgctgagctacttaagagtgctggaatttgtgacaattatagcgatttaagcgaagacaaaaagatcaagcttttactcaacgaattgaacaatgatccacgtaacttacacgccaataacaaacccaagtctgagttactacaaaaagaattaaagatctacaagactgctcgtcaattgaaagaccgtttgggtgaagacgtcatcaagcaacatattatttctcacactgagagtgtttcagacatgctagaacaagcaatcatgttaaaggaatacgatttacttgataatcaaaaagcccgaattcaagtggtaccactatttgaaacggttgaagacttgaataatgcccgggaaataattaaggaattcttaagctttgatatcgtcaagaagtggcttgtttctcaaaataattatcaagaagttatgttaggctactcagattccaataaggacggtggctacttagcttcatgctggaacctttataaagctcaaaaggatctaactaagattggtgaagaaatgggtatcaagattacctttatgcatggccgtggcggtaccgttggtcgtggtggtagtccatcatacgaagcaattacagcacagccattcaagtcaattaacgatcggatgcggatgaccgagcaaggtgaaattatccaaaacaagtatggtaataaagacaccgcctactacaacctagaaatgttagcttcagcaacaatcgatcgaatggcttctaagcaaattgttagcgaagatcatgtcgcagatttccgttcttcaatggatcaaatcgtagctaaaagcaacgaagtttaccggaaactagtatttgagaatcctaacttccttaagtacttcttccaagcaactccaatcaaagaaatctctggtcttaacgtaggttcacgtccagcttcaagaaagaaactcactgacttttctggcttaagagccatcccttgggttttctcttggtcacaaagccgtgtaatgttccctggttggtatggcgtaggttctggtttcaagtcatttatcgatgctgatccagccaacttgaaggaattacaaaatatgtaccaaggttggccattcttccactccctgctttccaatgttgatatggttttatctaaatcaaatatgagaattgccaagcagtatgcggatctttgcgaagatgaacaagttaaatcagtctttgatatcatcaatcaagaatgggaactaactaagaaagtcatcctacaaattgaaggtcatgatgaattaatcgaagatgcacctactcttaagaagagtctggaatacagaatgccttacttcaacattttgaactacatccaattagaaatgatcaagcgtgatcgtgaagatgtgattcaaggtgtttaccaaagtattattccaattactatcaacggtgtggcttccggtttacgtaattcaggataaaaaacacataaaattcagctaaaaaaggctcctcattgcctgttttatcaagcatttgaggagcttttttttaatttattaaactttttagttacgcctttttcataactaagttaagtggcgttacaattactggaacgacaatggctgtaaaaattgcttctactaaaccgttcatgcccagtgccataattaaaattaaaatcaatggcgtacctgaactataatttcctaggtaatgagttaagcttgctggatcatgcatgaagaaaatactcgtcagcaaaataaccatcacggtattagttaacgaagtgactgctccacttatgatataacccaatttcgcatatttagtcttactcatacccttcgcaataattcccgggaaatagccagccaaaatacttggtaccaatgaaattaccggattttggaacaacattaagctgaccatatcgccaggttgagtatatgcaacaatcaatctggtaataccccagaataagccaaagcctagacccgccttttgtcccattaacgtgccatagacggcaattgtcattggaatagtagttacagctggcaaagccgggataattcttacatagccaacatttggcacaaaagtctgtacaatcaataaagcagcaaagacagcagtaattgctaatcttttagtttcttctcttctcatatatttctccaacttaattctttagactcaattaaaccataattaagattttttctcagcaaaaaagtttattatacaatatctaggtatattttatctaatatgacaagatattgtattttttattatttttttacttaattatgcattatccttactctctctaatgcataatcgtgttctataccaattaagaatccctttatatcaatactttatgttgtatgtcaattttgacatagccactaaatattgttaatctagttttgtgttaaaaatcatttgatggagagaggatcaattttatgaataaaaaagtcaaaaaattactatctattggtgtgcttgcattgagtttaggtgcaattttaaccgcctgctctggtaaaaaacagggtgcaaacaataataaatcaagcgatgccaagcactctattgcattaattactggcggtaatggtgtaaatgataactcttttaaccaatctgcttgggaaggatttcaaagttatggcaaagagcacaacttgagccgcggtcgaaacggttatcaatattttcaatcaagtagtgctgctgatttcactcctaattttgatcaggcagctaaagctggttatcaaactatctttggcgttggttacagtttaaaagatgccgtagcttctgccgccaaacgctatcctaaaaagaattttgccattattgacgatgtaatcaagggacaaaagaatgttgtctcagctaatttcaagagcgaacaagcttcctacttggctggtgtcgtagctgctaaagaaaccaaaaccaacacggttggcttcatcggcggtgctcatggcgatattgtcgacctttttgatgccggatttactcaaggtgttaaagatcaagccaaaaaaatgcacaaaaaagttactatcttaaaccaatatattggcaactttactagttcagacaaggccaaatcaattgctcaatcaatgtacaccaaaaaagccgacatcatcttccatgctgctggtggtgctggtgatggtcttttccaagaagctaaagccattaatcaaactagaccagctaaagataaagtgtgggtaatcggagttgatgtcgatcaatctcatctcggtaactacactgctaaaggtgggcaaaaatctaattttgttttgacatcagtaataactggagtaaatgttgctgtcaaagatatcgccaatagagcttataataataaattccctggtggcaagaatttggtttatggacttaaaaacaatggtgtttctattgaacgaggacagatttcagcttcaacttggaaagatgcccaaattgctagagctaatatcctaaaaggcaaaattaaggttgccattcatcctaacaataaataaaagcatactagtatagtttgctttttataattacaatcaattattttttgcctgatcaatatttttgttgacaaaataccgagcaattaataaacttatttataaattgttcggtattaatattgtggaggacagaaataatgaacgtaaagttcaagaaaattttatcatttggtgtcgttttagcatcagttggcttgattctaactgcttgttcgggtaaaaagtctggtcaatcagccaacaaagatactaaacatggcattgccctaatcacagatgaaaatggtgttgatgatcattcatttaaccaagctgcatggtcaggatttaaagcatacggcaaggaacatggtttaaaacaaggaaaaggtggttatcaatacttccagtctagcagtgccgcagacttcactcctaactttgatcaagccgctacagccggctaccaaaccattttcggtgttggctatcaattagccgacgcagtcaagcaagcagccaagaagaatcctaaaaagaatttcgttatcattgatagcgttgactctgggattaagaacgtcgcttctgcaacctttgaaagcaatcaagcttcttatcttggcggattggccgcagcttacaccactaaaaccaacaaagtaggtttcattggcggtgctaagtcatctattattgatttattcgaagccggttttaagcaaggtgttgctgacggtgctaaagctcttcacaagaagatttcagttcaaacccaatacatcggtaacttcacttcaaccgataaggctaaatcaatcgctcaatcaatgtatgctaaccgcgctgatattatttaccaagcagccggtaacgcaggtaacggtgttttccaagaaggaaaagattacaaccaagcccgtccagcagctaaaaaggtttgggtaatcggagttgacgttgaccaatctaacctaggtaactacaagtcaaaagatggtaagaaagagaacttcactttaacttccgtcttaaagggcttagatgttgctactaagtcaattgctaatgatgcttacaatggtaaattccctggtggtaagcacttagtttacagcttaaagggtaatggggtttaaatcaccaaaggtaatttaaacgctaaaacttgggcagcagtacaaaaggctcgtcaacaaattattgatggcaagatcaaggttgctactgctccaactaagtaattcagctgcttagtattttgagaactcttcgttttttagcgaagagtttttctatagttaattaaggaagtatttatttacatgaaagaacagagaaataaagtaatcgagatgcgtcatattgtcaaagatttcgatggtttcaaggcaaatgacgatattaaccttacgctctatcaaggtgaaattttggctttgcttggtgaaaatggcgcgggtaaatctaccttaatgagaattttatccggcttgcttgaaccaacaagcggtgaaattctggttaataatcaaaaagtaaatattaaagatccaaccgtcgctaaaaagttaggcattgggatggtacaccagcacttcatgcttatggactcatttaccgttttagaaaatattattctaggacatgaatcaactaaaggaccagttatcgatctgaaaaaggcaagaaaacaggtcctagctcttgcacaaaaatatggctttgctattaatccagatgccaaaatctctagcattactgtcgcccaacagcaaagagttgaaattctaaaggtactttatcgtggtgcagatattttaatttttgatgaaccaactgctgttttaaccccacaagaaatttctgaatttattaaagtactcaaaaatttagctaaagaaggcaaatcaatcattttgatcactcataaattagaagaaatcaaggctgttgcagatcgagttacagttatcagacgtggtcacgatgttggtacttttgctgttgatcaagttagtgatgagcggttagccgaattaatggtggggcggcatgtcaacatgaagctaaccaaaccagcacctaacttgggcaagcaaattctagcaatcaaaaacttacaggtaaaaggaaatcacggtgccttaagcgttaaagacctttccctttcaatccgtggaggcgaaattttagggctagccggaattgacggcaatggacaagatgaactggttgaagcaatcactggtttacgccatgttaagtcggggcaaatcttaattgatagtcaaaatttaaccaaccaaaaagttcgcaaaatcaccgaagctggcgtagcgcatattcctgcagaccggcaaaaatatggtttaattcttcacatgtcattagctgacaacttagcgctgcaaacttactaccaacgtcccttctctaatcatggcatcattaatcatcaagcaattttgaagcatgccgtagatttaattaaaaaattcgatattcgaactactagccctgcattgccagctagcgacttatcgggaggtaaccagcaaaaagcaattatcgctagagaattaaatagaaacagcgatctaatcattgcattccagcccactcgcggtttagatgttggtgcaattgagtatattcataagcagcttttagctcaaagagcagcaggaaaagctatcctattaatttcatatgaacttgatgaaattatgcaattatctgaccggattgctgttttgcatgatggtcaaatttcaggcgaagtattacctgaaaaaactacagatcaagaactaggtcttttaatgaccggtgttaagaaagaagatgcaacaattgattaaagttacacctaaagtcaaaaatattctagtaccagttatctcagtaattgctggttttatagttggtgcaattatcatgctgatttggagttataatccttttcaagcatacagctccatgttctctagcgcactgggcaatatgaatggtattggtgaaactattcgtgaagctacgccattaatttttattgctatcggttttgcaattgcctcaaaagctggcttttttaacatcggtttgccaggtcaagcacaagctggttggttgacttctatttggattgtattggccaatcctcaattgcctaagccagtattattgcctttagctattattgcaggcgctatagctggtgctattgtggcaggaattgctggctatttaagagctcaatttggaactaatgaagtaattactactatcatgcttaactatattgtgctctatacttgtcaatatttaatgcaacaagtaatgtcctcaaaattaagaattgataccgatactaccaaaacaattccagccaatggcagcttaaagcttaactggttaactagcatgtttggtgattcgcgaatcaatgctggtattttcttagcaataattggacttattttttattggtatttaatgaaaaaaactaccgttggttttgaaatcaaggcagttggactcaatccttttgctagtcgctatgccgggatgtcttctaaaaagaatattattatttcaatgttactttcaggtgcattttctggcttaggcggtgtagtacaaggacttggtacctaccaaaactacttcactcaaacaactagtttggatattggctgggacgggctttcagttgccttacttggtggtggaactgcaattggtattttattagcttcacttcttttctcaattttaaaaattggtggtttgggcatgcaaactattgccggtattccttatgaaatcgtatctatcgtaattgctgccatcattttcttcatcgctatcaattatgtcattggtttgctttttaaaactaagaagaaccgcagtgattactacattccaaccagaaaagaaaaaggacccaacaatggtgttgatggtccaggtagaaaagtaatcgaaggagaaaaataatgaatttcgttacaatgatggcgttaattgtttcatccactttagtttattctgcgcctctaatcctagcttctcttggtggtgtttacagtgaaaactctgggattgttaatattggcctggagggtatcatgaccatgggagcctttgcggcgattgtcttcaacctaactttcgcttcaacttttggtgcagctgctccttggcttggcactctagtcggcggaattgttggtttgattttttcattgcttcacgctgttgccacaatcaattttcacgctgatcatgtcatttccggaacagtgctgaacatcatggcaccacctttgggtgttttcttgatcaaggcaatttatgataaaggccaaactgaaaatatcaccgctaactttggctacttcagctttcctggtttaagcagcattcccatcgttgggccaatcttcttcaaaaacacctctgcccctgcttggattgccattattcttgctattttgatgtggtggattttatataagactcgctttggcctacgcttacgttcatgtggtgaaaatcctcaagcagctgacacaatgggaatcaatgtctattgcatgcgttatgcaggtgtattaatttccggctttatggcaggtcttggcggtgccgtctttgctcaagcaatatctggtaacttctctgtttctactatcgttggacaaggattcatggctttagctgccgttatatttggtaaatggaatccaatcggtgcaatgctctcatcccttttctttggttttgctcaaagcttaagtattattgggcatcaactgccaggaatcgatcaaattccatccgtttacatgcagattgcaccttacgttattacaatcatcgttttggtcctcttcctcggcaagtcagttgcacctgccgcagatggggttaactacatcaaatcgaaataaggaaaaaaggttgtttcacatgaaacagccttttattttacacatgtccacatagttatccacaagatatagcacttatatgtggtagtcttactatatcttgtactaaataacagctatcggcgttttctcagttggcattggaaaatcactgttaagcaatctaagctcatcatctgtaagtttaatcttttgtgttgcaatattttccttcatgtgttctacactacttgccttaggaatcgttaaaacattgccattgcgcatcgtccaagctagcattatctgatgaggcgtaacgccatgatcacgtgcaacaattttcaaattacgcgtaattcgaattgtgttgcccttgcctgaattaaatggtgaatacccaataaagtttacaccgtgctcttcttgccaagcttgcagatcaaattctgtcccacgttcactgatattgtataagtcttcattagcaaagcattcttctccacctggcactgtaaaaagctcctgcatatcagccgtatcaaagttagatacaccccaataacggatcaagccatctttttgtaatgcttgtaagccgtggatcgtatcagacaagcgatgactgccccgccagtgtaatagataaagatccagatgatctgttccaagacgttttagactggcttctagactctgacgttctagttttggcgttgcatgataggggtagaattttgaaatcaaaaataatttttcgcgatcatatcctttaatcgcttcaccaattagctcttcgctttggccatccccatacatttcggctgtatcaattacactcaggccatgatcaaggccatagcgaatagctgctatttcatcttttttctttttaggatcttcacccaaaccccagctaccaattcctaaacctgttagtttttcaaaattcatcctcgttcacttccttatgttcaaattttaacataattgattcgtaattatttttatcaatcaattgacaaaatggtctattccattttataatggactagaccaacaaatgaggaggacttaattatgaaagttattgttaccgaaaataaaattcaaggtggagcaaaagcatttgaaatttttgaaaaaggaatcaagaacggtgctaaagtcttaggtttggcaaccggctcaacccctgaaacactttaccaaaactgggtaaaaagcgatcttaactgtgaaaatcttaccagcattaacctcgatgaatacgttggtttaaccccagataatcctcaaagctaccactacttcatgcaaaagcatttatttgacaagaagccatttaagaagacttacgttcctgacggtatggcaaaagacgttgatgctttttgtaaagaatatgatcaaattatcaaagacaatcctatcgacattcaactattaggaatcggccgcaatggtcacattgcctttaacgaaccaggcactccattcaacatcggcactcatgaagttaagttaaccgaaaatactatcaaggctaatgctcgcttctttgacagtatcgatgaagtgccaaagagtgctatctgcatgggtactgctaatattatgcaatctaagaagattgttttgatggcttttggtgaaaagaaagctcacgcaatcaagaaaatgattgaaggcaaagtcactgaagaagtacctgcatcaattttgcaaaaacacccagatgtaacggtgatcgtagacgaggctgccgcacaagaattagacgacaaatacaagaactaaaaacaataatttaattatcagcatagaaaaagctaggctttctacaatcgtggaagacctagtttttttatttagcagcctgtatctacaatgaaatatacttcacaaaattgcatttttatataaaaaatgaagcataattcagttttttattgaattatgtttcattcctattcgattttttatttctacccttgacttttagatgtgaaacataatcaaaaaatcacttgtgtgccacaacatatcgtattaaacttaataattgtctacatatggtatttaagaaagaatgtgattcaagttattgttttaagtgggccaattggagccggtaaatccagtttaaccagtattctagctgaacatttagggactcaggcattctatgagggcgttgataacaatcccgtattgcctttatactacaaggacatgaagcgttacacttttttgcttaacacttacctccttaaccaccgtttagcacagatcaatcaagcaattcaagaaaaaaacagtgtctccgatcgttctatctatgaagatgcactgttcttcaagatgaacgccgatagcaaggtcgctgatccaaccgagttcaagatctacgatgacttactcgacaacatgatggaagacactcctggcaatccaagtaagaagcctgacttactgatttacattcatgtctcccttgatactatgcttaaccgaatcaagaagcgcggtcgttcatttgagcaaatcagcactgatccaggtttgaaagattattacgcaagacttttaaagtactacgaaccatggtatgaaaattatcatgcctcaccaaagatagaaatcaatggcgacaaacttgattttgttaccaacatggatgcacaaaaagaagtacttaaagaaattgatgaaaagttgcatgaaatcggcaacttataagaaaaagaaggaacgtgatgacagttattgttttaagcgggccaattggagccggtaaatccagtttaacaggtattttatctaaatatttagggactaagcctttctatgaaagtgttgatgacaatccagttttgccacttttttacgctgaccctaaaaaatatgcattcttattgcaagtatatttcttgaacacacgcttccacagcattaaagacgcgctcactgaagataataacgtcttagatcgttctatctatgaagacgccttattcttccaaatgaacgctgatatcggccgtgctacttctgaagaagtcgatacttactatgagttattgcacaatatgatgggcgagttagaacggatgccaaagaagaatcctgatttgcttgttcatattaatgtttcatatgatacgatgatcaaacgaattcaaaaacgtggtcgtccctatgaacagttaagttatgattcaactttagaggactattacaagcgtctgcttcgttattacaagccttggtatgagaactacgattactcacctaaaatggaaattgacggtgataaattagacttcatggctaatccagatgataaagaaaaagttttggatcaaattacagccaaactaaaagagatgggcaaattacctgaagattgggaaaagcctaccgatattcaaattgaagcataataaaaaccattcatttgcgaaattatcgtatttgaatgattttttgtttacagtgaatttttcgctttattgttgtataatttgaaaaaatgtgtttaaaggaggagtttgaaaatgatgttaaccgtaactggtggacaatggtttttcccacttgtcataatttgtctaattttgggtattgtcgcaaccatcgctcaaaagaaaaagctgactaaactaaaaagaataaccgataactttgcctatgcaatattagttattctcttaatcattgaatggattctatattttcaaaaacaatttaattttattactccagcaatctacacccttgttgtcatctatcttattggacggcaattactaatcagataccgttcttctctattgaaaaaattaggggctaaatataagcaactgacaattggacttgctactatttacattattttagttaccttattgcttttaatcggatctaaattttcaactatgggctggatcattgctggattagttatcgtagcctttggcttcgttagctacatctttgaaaaagacaaacaataatttcccaggaaataataactcgcatagagcttctatgcgatttttatttattcaatttttgctaatgccttcgcaaccccatcatgattgttatcagcagtaatttgttccggagcaaatttttgttttagttctgctggggcattacccattaaaaatggataccccacttcttccaacatatcttcatcgttatagttatcgccaaaagcaatgcaattttgcaagtctacgccatattcttgagcaactattttgactgcactagccttgcttacaccctttaaaacaaattctaataaattctctgctgatctaacaaaagtcaaatcaggatatttagcagttaattcttcttgcatacgatcaagatccgctgaatctcccataattagacctttatgcacgccctgcagtttttcaagttgattaattgtagtcggtgttgcttttacatcgacaattctttcttcatttttaacccgtgggctcttttcttcactacaataccaaacatagccactatagatattccaagctgcatcattatcttgctcatcaacgtagcggcaaatttcagctgcttcttttgcattaaaaaaacggctgattagtactttgcctgtttcatcaagggctaaagcaccgttatacgcgataaacggacaaactttcaaaatttgattaaccactgtcatcatccctttaggaagacgtgctgatgcaggaacgaaaatattaccattaataatttgtctacgaattgcatcccgcgttgcggcggttacctttaaatcatcattaattaatgtgccatcaagatctgaaaaaataagttgtgcggacattctttcacctttatttcttttttaattcttatatcctaggataatgctttatttatgctaatgaaagctgattcaattaaatgcttttcctatcatttaaagataaattgcaataaatgcccaagtaatcattaaaataattcgcgtttacaaatttatttatcaatgctaaagtataagagttgtgttcaataagttaaaacacgaacaatattttggggagataaaatgaattttataaaaagctactttcaattagataagtacaaaaccaacattcgaactgaatttattgctggtttaactacctttatcagcatgtcctatattttgtttgttaaccctagcgtactgggcgccagcggtatgaataccggtgcagtcttcaccgctactgctttagctgccgctcttggtactgcaatcatggggatcgttgccaactacccgatcggtgaggcaccagctttgggaatcaatgccttctttgcttacaccgtatgtattgggatgcatgtttcatgggaaacagccttggcttcagttttcgttgcatcaattattttcatcttaattactttattcaaattaagagaaaagatcattgattcaattccagctgacttgaagttcgctatttcatcaggtatcggtttattcattgccttcttaggtttgcaaaacggcaagttaatcgttgcaaataaatcaactttggttggtttaggttcacttcacgatccacttgtttggattaccatttttggtttgcttgtaactgttatcttgatgatcttaaacgttcctggtgcaatctttatcggtatggttttggcagctatcttcggtatttgtaccggtcaaattgcattgccacacaaggttatctcaactgctccaagtttggctccaacttttggtcaagctatcttccacgttaaagacattaacactgttcaaatgtgggttgttgttttaaccttcctgcttgttactttcttcgatactgcaggtaccttaatcggacttgctcaacaagctggtttcatgaagaacaacaagatgccacgtgtaggtaaggccttagcagctgactcaagtgcgatggctgttggttcaatccttggtacttcacctgttggtgccttcgttgaatcaagtgctggtatcgccgttggtggccgtaccggtttaaccgcagtttttgtagcgatctttttcttaatctcaatgattttcagtccattgcttggtgttttcactagccaagttactgctcctgccttaatcattgttggagtattaatggcacaaaatactgctcatattcattggaacaagttggaaattgcagttcctgcattcttgattattttagggatgcctcttacttactcaatttcagacggtttatcatggggcatgatcacctaccctatctgtatgcttgctgctaagcgtggcaaggaagtcacaccgatgatgtgggtactgtttgtagtattcctgatcttcctgtgggtactgaacttttagatgaaaaagaatagataaagaaaaggactaagttcgaatttgaacttggtcctttttgtgtattcactaacattactttttattcttatcgattataatcgataaaaacgtcaaaatcaccaatcttatcgagtataatcgataagattgcaaaaaaagagtcttttatcgactatactcgataaaggctcttttttatattacccaggaaatattaacgtacagtttctaaacaatatgattttttataataaaatgcgtcataacaggcgaattttaattggctttaaaatttcttttttctaaaaacaagatagcctaaaagggtaaaaagaactatatagcacaatgtaccaattaataattgtggattagagagatgggaggttaagtgataagttgcataattataatactgtgtcgttaaattgagcatattcaaaggattccaacgaataatatcaaccggtccaatattataatttaataaattagatgatagactgcttcccataaagataataattgcatttatcataataactacggtgtttgaattaatcatacaagacattaagcaaataaggctgattattaacgtagaggttataatatcaacgcctgttgttgaaagcatatttataaataatgactgattatacttataagtcgcagtccaaggaactatttttgctataagtggaacagtgttaaagaagatagttacaatcatagctatggcatgtagaaaaagattataaataaaaattgtaatgaactttgcaagatatactgttcctttattttgagcatgatatagtaatgtcaaaatcgttttgttttggaactccattgagaaaatagttgaacctactatgaccaaaatcaacataattatttggctagagttataacaagtcataactaacaaattgccatattgttttcccatggccaatcccataaaaatcataaaaagaatcataaaactgataatccaccaaggcagcttacggtgacctaacttatagaattcttgttttaattccgcacgcataaaagatcacctccgcctaaatagaccgctttttaaacagtaaagcgccaatccaaaagaaaactacagcgtacactaaattagcaataattaattctgaattagtcaaatgtgttacagtaaccatctcattattcgatagttgcgtaatgatattaatcatatttaatggattccaggctaaaattgatttcaaaccaggaaaagccgacattgctaaatttgaaagatctgaaccaagaaatccgattgctagtccgattatgatcactgttgcattattcctaatcaacaaaataagcattaaagagagggcaacgataaatattaaataaatcatcgttcctcccatatttaggaatagcgcattgattaagggatgtccatgataatcatcatgccaagaaaatttcgaaccaaccatcaaggtcttgagaataaacgaaaagattatcccaaataccagtaagatgaaactataaaaaactaaaacaatgaacttagctgtataaagaatggacttatgtgatgttttgtagagtaaggttgccatagtattatttcgccactccattgcgatcatatcagaactaatagcaataatgatgataatagcccattgtcctgcaccgaatccttgagataagagtgagggcgtcattttataacttgtaccaactgtatacaacattagtactaataaaacgagaatcccatacaatggaatcttgcgatgagcaaatttatagaattcgtgtgagagattaattttcattattatctcccccttgttcttgccgtaagatgttgacaatcttctgttctaaagttaagccagttggagccaaatattctatccagatttcattatcaaacagtagcttttgaattttatctatatctttatgatcaactattacagcatcatcttgtctatcaaaaggaattttagcttgttgtagcaaattggtagtttgctttatatcagttgtttttaatttagattttggatttttttcttgagtgaatttgctcataggtgaatttataataattctaccgtgattaataatgattaccgatgtcattactttttgtaattcacttaagacgtgactggaaattaagaaggctgtaccacgtgcagcgtattcatgtatcagttttcgaattaagattgtagcttcaatatccaaaccattcataggttcgtcgagaataaccagttgcggattatttaacaaagccaaagctattcctagtttttgcttcattccaactgagtagtcttttgcctttcgatcaatataatctttcatccctaatcgattaatcagtttatccataccacttaagtctttagcatagagctttaaattatcatatccagacagaaaaggataaataacaggcttttcaattaaagcaccaacagattgtagtgctaaatgatctttaagagtaatttcgtgatcattaaaactaattgaaccagtgaatttagttaatcctagcaaagttttcataatggtggttttgcctgctccgttatgaccaataagtcctacaatttcaccaggtgaaattgtaaaagatgcatctctaataatctctttgtgaccataaaaaatatttatattgttaacttttagcatgctatcctatctcctttaactccggattagacagagagttaaatcacttttctaattaaagtacctatattaaagtctagtatcctttcctgaattgtcaaattaagtgcaacagtgtaagtgtcaatgtttttgcggtagcctttaaaccattagtctaaccttaatttcttaaatatttatatgacttaaatttctgcttagcttgcttaaataactattgccagctacctgtgcggttaatgcgccatgctggatgcctaaatgaacttcatgacgcttctttaagctgtcacgggccgctgcttttaattcctgttcagtcaatacagttatttctgaatcttcaaactcgctgctaagccaaaattccagctctcgattcttgatgcagcttaagatcctaagcatgccttctgctccagattttgaccatttcttgccttgccccttaacacggtaggtatacttgcggtggttgctctcgcagcagccaatggctttagtcacagtcagttttcgtttcttaaacggcttaatatcgtcccaatgacgatcaatataattccttaggcgccccagataatcatgattgagctcggtattcaattcatcaattagtcggctttctgcagtggttaggatagttttaactttgtcatagctgtatttgtattccaaagcagaaatcagcttgccttgcaggtcaggcgcaaaatatagcctttctttgattttcttatttaggtgaaagacatccaagaaatgctcatgacgcttgcatagccctacaatgtcatcgaagtctgttttggcatatccagcaccgccatcggcgttgctaagaattacagtatcagaaagatcataagtattggccaggtactccttggcttcgttcagcgcatcaagtcggcttaaagaaacaaattccttggcattgattcgctttctgcgtttcttgcttatattgacaatgccttcacagacctgatagcgatgaaattccaaccggcttttagtgcctttgatcaccacgccatcgccttcaagatacaaaactgggacctttttcttagtgcctgcggcatcatatcttgaatctgcttcttggcccgctttaatatttttcccggccatttttaccaaattgcccacctgcatatggctaatattaaagccagacaggcaattgactgctagagcagtattgcgataagtggcaacgctgcttacttctaagatgtttttgactgctaaaatactgtagcgcttgtatttgtcaaagcccattaattcatccaagggataccttgcttgtttgcctgggcagacatatcttcttctgacatacctaacttcgccaaaagccatattgattgagcgctcattcttcttatcaatctgatagccctgtgctttaaccttggtaatcatttcatcatcaactttagctaaagccaaggccatgatttccttaatcaggtttaagaagaaacagattatttttctttcacgcttaatataattatcttcagactttataatatttgcgatttcagttacaattgaattcataaaagaccagcttctaatgtgttttttgttcttaacatcagactactggtctttttgtttgagctcaagtccaaattcaaaggacttgggcttttttaattatttattcaacttaccgtaaaaaattatacacttaggcaacagttaggctatgaagaaatatattgcttgaagagttcttctgctgtctgatattggaggattcggcgatatttgtggttaatggcattggttgcctgttgaacataagcttttgacttgtctttcatgctcttgcccttagggaagaattgacgcaaaagaccattgcagttctcatttgtgcctctttcccaaggagaatatggatgagcaaagtagatctgacatcctttgattttggtcatatccgcaaactcagaaccattgtcaaacgtaattgatttaaaccaattaggatgtctgtcaatctccttttgaagcagtctttgacaagtactggcccgatagtcaggaattttgataacaacctcaaaacgagtggttctttcagtcagtgtcattaaggcaggttgatttttacgtctgacgcctttaaccaaatcgccttcccagtgcagggaaacttttctgttttcaacttctttaggccgctgttcaatcgaattgccaagattctttttatgcggagcatggccaccatgactatgatggcgtttgtttctgcgtcttttaagcttcattggcaggtcgatattgcttatatccagcaatccttgatcaatataacgatagacagtgggcgtgctaggacatggataatttggcataatcctgtgaaattcaccaacgaattcatcaatgctagtggcatcaaatttggctttaaagcgtctgcttagcattctgaaaaagacggcatagtgttgcagtggattacgcttatagcagtttctgcggcgcttttcatgataaatttgtgcagtaatagtgctcatacaagacatagctgctgtctctttgcaggacactgcctcgtctaatttcacggctgatagttgatttatgacagcctacttcttgagcgatagcattgcaggaggttatgccagaatcaagcagagcttgaatttgtccacgttgttcgctgttcaattgatgataatgcttggaaatgctagaatttgagttggtcatgaagatcttcctttcttgatttttggtcacttcaagtttaggtcttcatggcctttttgtttaacacttagtgttgcacttcaattttaaatccgggtctagtatccttttaataaatattttttactatgttcacatatgaacaataaatttaagattatctctaataaaaccgattttaggatttttttgaataaatttgctttatttgtttaaatgcagtttcaaaaccatcttttagagtattcaagccctgcagttctaaagcggcccacatcaaccgtaaattgcgatcatcatttgtttccaaaaaatttaacataaaatgcatgtatttgtatcttattttttcaaaagcaaacctgtctgtaatatctaagccagaaattattgcatctaatctttttgccttctttagatcttttttaataagaatatattctgcattaatcaaagtatttaaaatagctgtagaaaatttcgaaactgtcaaatcttttgtgtaaatagatctttctcgtaaattgattttttaattatttatttaatcaaagtaggattctaaggtgtcctgaacctgaccaaagcctttatgaattcgattgaaataacggtcattgtagctcattgcctgaatgccaataaaagcatcaagcgactgttcagttggaaactctgccttaggcttagctttgcgcttgatcacattgttaaatgattcaatcatgttagtcgaataaattgaagctctgatctgcttgggatagttataaaagaccagcagatctggttctatgtctttcaagcttctgataacatggctgtaaaccttgccccatttggtatagaagtcatgcaggacagctgtggcttcttctttgtttgtctgttgatgcacctgtttgaattcgttcatgatcttttcacgatcgtcgacgcgtactttagcgcagatattgcgcatgacatgaaccaaacagcgttgaaaatgagctttaggataagtcctggccaaggctgttttcatgccaacaacaccatcagaaagaaaaagctcaacttgctttaagcctcgggatttcatgttttgaagcatatctgtccagacttcaatgttctcgctaggcgcaatgcagtagtcaatgacctccttgtgcccattaggcttgatgccaatggcaatatagactgcttcacgctcaaatgtttctcggcgcaaaggaaggtatgtcgcatccaaatagacgcagaaaaacttgtcgcttagcttgcgtttgtggtaagcctcaacctttggaatcatctgcttggaaatatttgatacctgagctggactgtaatggctgccatacatcttttcaattagatcggctatttccctggtggtcacgcccttggagtaaagcttgataatcatgctttccaagatatccgagtgctgcttgtagtcaggcagcgtgtgctgatgaaattgaccgttgcgatcccgaggcacttgcacttcaattgggccaaattgcgtatcaactttgcggaaataagcaccatttctagagttgccagtattccagccatttctggcatagggatcatagcccagaaaggcagtcaattcagcttctaacaagttattaacagcctgttgtagctctttgcgcaataaatcatttattttgtctggattgaatagagcttgagcaaaatctttggtaaaatcattcatgaaggagttcttctttctgtatgtgtttttttgttcaaaccaatcatacgagaaaggaactcctttttctaatgtttaaagaaataaatttaaggaatcattcatccttacacaaactattttacagtctcaaaatttcatttccaaatcgttattatttttaaaatagaaaactagtgaaaaagataaactataaatagttcttgggctaataagattctgagtattaccaaagaagtacacatcatcgtaataccaaacttcatctccagataaaatttttgaaaagtacatcgataatctctttttatagttatctgtaaaaatatccactcctgtaagatcgtaataagcattacaataaatggctgcttttaaaaaagttcgtttatcgaaactgtcattttcaacttctgataacaattttttagattgcgtttttaagtaattaatatcattactttcatatgcttttgaaacttctaaagttatattttttagataattcgaaatattattattaaagaaatctattttttggacatgaattacttcgagtagtttgaatactttttcaatatctaaacctgcttcgcctctttcccatctttctaattttgaacgagaaatacctactgcttccgcagctttactacttgaaattttggttgcctttcttaattttctaaattttctaccatatgtttctttcataacccactcctagttacgttcacaaataccttcaaaataatgatccagataaaggactagttttacctccttaatgatgccttaatgcaataaaaaatcaaactcataaatattacctaaattttcatttagcgctactaaaaaagcctaataccatcatcaagggtattaggtctttattacctaggaaatactaacgtacagtttccaaacaatatgattttttatgacagtttgggcaacgcaattttctagtatgtggcgtgtgtgccgcaaacataaagcttttaagttctggaacaaatttgtaatcgcaattaggacaaatatatgccactttttgataataatttttaagtaacacgaatgacattgcaatcaagcttactactaaaatagctaccgaaatataggctgcagtgttcatcttattgatgatacagtacgcaataaatgccataccgaccaattcaacagtgatttctactgctgacaatttccacattgaacgtgttacctctttgtatctagtttcattattcatgattttcgtaatgtcagtaacttccgcaatattattgggtttacttagaaccttttgtagttggataattttcttgttttgctcttctaatttttgcgtttctgctttatttctttttagttgatcttcaagcaaaagatcgattaatttatcaccatttttatcttctagtattttttgaatatcctttaacgaaaagccaagctcctttaaaaagatgattaattttaattgttttacctgctcatcagaatataaacgatagccactttcactaactcgactgggtttgaccaaacctttttgatcatagtaacgaatggttctagtggttatgtttaacttctttgctagatctccgattgtgtattctgacattactttctcacctcaaaacttaaatatacgggtttacgctacgtcagagtcaagaataagctaaattttccgtaaaaaacttcaaaaagcaaatattttgctcttttcctattgaaattattaacattaactgtataattttaagtgaatgttcactttatacaaatttcggaggactaaatgaacgcaatcagtaatttctttcatttaaaggagaacaatacctcctttaagaccgagcttttagccggtttgactacttttgtaagtatgtcatacattctgttcgttaacccaaacgtcctaggtgccagcggtatggataaaggtgctctattcaccgttactgcattgtcggctgcctttacctgtatcgtaatggggcttatcgctaactacccaattgcttccgcaccaactttgggcttaaacgccttctttacctatactgtttgtttaggcatgaaggttaagtggcaaactgctttagcagctgttttcgttgcatcaattctgttcattttgttaactgtctttaaggtacgtgaaatgatcattgatgccatccctgccgatattaaatatgctatttccgcaggtatcggcttattcatcgcctttatcggtttgcaaggtggtaagttgattcaaaacagtgattctaccttagttactattggtagtctcaacaaccctactgtttggatcactatctttggtttaatcattactattttcttaatgattgccagagttccaggtgccatcttcatcggaatgatcgccgctgctgtttttggcatagtgactggtcaaattcccatgcctaaaggcgttatctcttcagttccaagcattgctccaacttttggtcaagcagtcttccatattggcgatattaataccgttcaaatgtggatcgttgtctttacattcttacttgttactttctttgataccactggtaccttaattggtttggttcaacaagcaggtctgatgaaggacaacaagatgccacgtgctggtgaagctctagcagctgattccagtggtatgttggtcggttctgttcttggtacctcacctgtcggtgcctttgttgaatcaagtgccgggatcgctgttggtgggcgtaccggtttaactgccgtttgggttggtattttcttccttatttcaactatcttcagtccaattttgagtgttttcactacccaagttacggcaccagctttaattattgttggagtattaatggccgaaaacttggcacacgttcactggactaatcttgaaattgccatcccatgtttcttaatcgcattgggaatgcctcttacatactctatttcagacggacttggctggggtttgattgtctaccctgtatcaatgatcgcagccaagcgtttcaaagaaatcacgccaatgatgtggattttgtttattgttttcgtaatctacttcgttgttttaaatgtaaaataattctatcttataacccccttatcttacttttacattaatatataccctcacgcgtggtgctagttaaatcgttctagacaataagccaaattataagctaaaattgcaatttccaaccggctttgaaagcctatcagactacgtgctcgattgttctcggcattgtaataggtcagaagcgaaaagtcgctttcaattgttctgcgaatagccatcaattgatgatcattgtgctttttagctcctgtcatatttttacgatatggtgtccaaagttcgtaacccatttgttttagctgttgatgcagttctttgcctaaatagccttcgtcgccaagaagatagtaattagatggatgggtattttctatcagttcaactgtctccctggcatcatgaactgatgcctttgttacgacataatcaagaatgtaaccgtcatcgctaacaatggcatgaactttgaaaccatagaagtaaattttcttggtggccttataaccaatgttggcataaccgcgaaaaattttagcacgatagtttcgaattggttggcaaacaggtaccggaaagctgtcaatgatcaagaactgtccattcaggtcaacctttttattcatttcttgccgtatctgataaatcaattgcaatagctgacgtgaacgccgattaaaacgtgagtgtgataaacaattgaaacattcacagaatcttctttgtgattcaattcctgtcttagcttgccagataagtaaagccaaaatcagactgtccgtagttttaatttgatcaatatttcgccgatgagtaaactcagccggtgcatacaaacgataccagtgccgacaaattatcactaaatctttaaaactaacttgtaaatggtggctaaaacgcttaagcttaaggcagttcaatcagatcagactcttttctattattactatttacaagtcgagtctaacaagattggacttttttattaactaaaacgatttaactagcaccacgcgtataccctcatctaaccaagtagcatgtctacttggtttttatgctaaaaagatgtctgttaatagtatggatgatgacagcagattctattagatgatataataatcaaagaaaggctgtgactaaaatgaaatcatataaaaaaattcaagctaatgttgactcctcactagcacttcaagcagaaggaatttttcaagatatagggctcaataccactaccgcaataaatgtgttcttaaagaaagttgtggcaactggtggtatcccatttgaattaaaagaaactcctgaacaaaaagcctcaagagaattaattcaaagcatctcaaaaattccccacaaagaagctaaaaccaaaaaggaaattgaggattggctagatgaggactaatgatattgtagatatttatgttgcttacattgataagcctggaggaaaaaataggcctgtattaataattaaattactaaacagtaaagcttggctgctaaaaatcacttcaaaatataaagaaaaaagtgaaaatatccgaaagcattactttcccatttttgactggaaaaaatataatttagataaaccatcatacattgatactaaaaattatttaatagttactattagtgatttaaatatcgaaaaataccgaggccatttctcaatagcagatttacgcaaattaaaagattttattgacgaaaattcaaactaagaattaaactatatgttttagttcctaaacacaatctcaaatatgagattgtgtttttatttatccaaatggcatcttttgataatcatttgacgccttatgatgttcggattcttctaaattgccgctatactattttcaacaaatcgagttatgaaagatttatttaggaggaattcattatgacaactcaagaaggaaaaactgctttaattactggttcatacggtgggcttggtacccaattcgttaacattcatgcttcacacgggggtgacctaatcctagttggtcgcaatgctaagaaattagccgatcaacaaaaagaagcccgtagaaagtacaacgtaacggcgcatattatcgatgttgatctctcacaaccagatgctgcgcaaaagatctatgatacttgcaaaaagaacggttggactattgactacttaatcaacaatgctggctttggtggtcaaggcgaattcattaaaagaagtatggaacaagacatgtccatgatcgccgttaacattgaaacgcctactcgtttaactaaattatttttacctgacttcgtaaaacgcggccgttatgcctggcccacttcaagccgtttactacgctactaaagcatacgttacaagctggtcaaatgcgttatggcgtgaagtacaaggcacaggcgttacggtaagctgcttaatgcctagcgctatgcaaaccggttttatcagtcgtggtgatttgagttcaactcaattattcgcccatgcggttagtccataaggtgttgcaaaagctgggtatgaagaaatgattgaaggcaagcttaacattaccgctggtttaactgcagcccaaaaaccattcatgaaattggaaccaatgttacctaagaagatgctcatgaacaatgtttataagatgcaagaacaaggtagtagaaagtaatcaacttatcttataatatggatcaaaaggatggtatttgaatgaatcactttattttagatggtcgctatgaagacctactctcttttaacgttgaagaagcacttaaaaaagccaatattcctgaagattgtttcaaaaaaccccatccttcaatgagtgaacaacaatactacaattttatggcggctattggtgatcagattagtgatccattcactccaattgaaattgcaactacaaatccaattgaatctttctctccaccaatttttgcggcatatagtagccgtaacggagatatttttatcaagcgtctagccaaatataaaaagctgattggcccattatcttttaaaattgatgaggatagcaagcagctctctattaccctaactccaagtaatcagcaatattccctaccctcttttctagttttatcagaatttgcatttttagtgggacttttgcgcaagacgaccaaagaagctatttccccgctgaagatcacaatgacatcccccgtcaatgatgagcaggtcattaacttctttggctgcaaaatcgaatcgggtaaacgcaacaccatcacttttgccaaaaaagacttgcaggtcaattttattagttataactaagcaatgtgggattatttcaagcctgaattaactaaacgcttatctgaattatccgttgatgattcaactagtgctagagtacgtagcatattgaccgaattacttcctaatggtgaatttacaattgacgatgtagctaaaaagttaggttattctaaacagactttacagagaaagttgagtagcgaaaacactacttttcaaaaacaactgaactccacccgagaagttttagcgctaaattatttacaaaacaccgatatgacaactagcgatattgcttaccttctaggctatcaggaatttaattcgttcttacgtgccttcagcatctggaaaggcataagcattagcgaatatcgtgaaaaaatgaataaataataaaaagcagatatattttctgtttttttactttataaaggaaataatatgagatttttgctataatttactttataaaggaaataatatgaaaattgctaaaaatttactttatgaaggaaataatatgcagttaaatttaattaaccgcccacagtatttaaatcaattacttcaatttcaaaatacagaattcatcaaagtactgacgggagtacgaagatcaggcaaatcttatattttaatgctttatcgtgaatatttactcaaacacaacataaatgaacatcaaatcatttatatttcttttgaagactttgataatatagatctttatgaacctaaaaagctttattcatacttaaaagaacgaattattagtgaccaaagaatgtacattctacttgatgaaatccaatatgtatcagattggcaaaaagtagtaaatagccttcgacttaatcctctacttgatatcacaattactggcagtaattccaatctattaagtggagaattagcaaccttactatcaggaagatatgtagaaatacatgtttatcctctttcttttaaagaaatgctagattttaaacatatttctgaaccatcagagcgtcagattgataacttatatgatgaatacattaaatatggtggtttccccgcggtagtgttagcaaaagaagaattaaaacaaactattctttctggaatttacaataccattattgtcaatgatatcggctacaaaaatggattaagagaaccagaattagttgcattagtagctaaatatctagcagattcgattggtcaattaattaatccgaacaagattgtaaatacactaaaatcagcaaattttgatatctcttataacgctgtgcagcgttaccttaaatattttgaagaagcatatcttttttataaatctagtcgttatgatattagagggagaaagattctttctactcaaggtaagtattacattgtagatactggtttgcgtacccaagctttaggagaaagaaataatgaccgcggtagtgttttagaaaatatagtttatgtcgaattacttcgccggggctacacagttcaaattggtaaattagataataaagaaattgatttcatcgttttcaaggtaaatgataaacaatatattcaagtaacctaccagcttccagaaaattctactagagaaactgataatttacttcaaattccaaataactacaaaaaaatagtcatcactggccgatatgaaaatgaagaaatgatttccggtattccaataatcaatattaaagattggttattaagctctaaaaactgatcaaaataggatcgactaactcatgtcgatcctatttttaaattaaattatgttttttacaataagtaaaaattccgtcatcttgcacgctgccacagatgtcatcagcaatttccttcacatcgtctgttgcgttccccattgcaacgccgtgaccaacagtctttaacatttcaatatcgttgccgccatcaccaaaggctattgcttcgctcacagggatttgataataatctaacactttttcaattgctacacccttactaccagtagctggaataatatctgctgctctatcccaccaagctgttaccttagcattttgcgtattagctacaagtccgtcataatctttttcacgacagcctaccattatttgataaaccgtatcctgatcgacaaccacatcaaaatctggcgccactctcaaatccgttccaccaatagcaaagtattcctttaaatcctcatcaacaccattagctgcaatccgtgttttggtagctacagctaacggccgatttattttctgagcattttgaatcatatgcaagacatctccttgccttaacggattatcaaaaacaatgtcttgatcgttatagcagtaagaaccattaaaagttaaatatgcatcaaaatctacacccaacttaggcagttgcactggtggtctgcctgatgcaatacaaatcataatgccgttgtcttgtaaagcatgcagtgtctctagcattttaggtgtaattgattttttcttttcaattaaagtaccatctatatcaaaaaatattatcttaggtttgctcattatttttaccttctaaagaattttctactaattattatactttaaccgatatttcccaggaaatattaaaattgagctctcttcctcaacatctgtgctaaactagatacaattagtttctttaaaagttaatagttacggaggaatttttaaatgcagacattggaaaaagtctttcatttacaagatgctcataccactgttaaacgtgagttaatcgctgctttaaccacttttgtcagtctctcctacatcttattcgttaacccaaacattttgcacgcagctggtatccctaaaggtgccgcttttactgtaacagctcttgccacagcagttgggtgttttttaatgggttttattgctaattatccgattgccttagctccaaccttaggtagcggtgcctttttcgcttataacgtatgtgttgggatgcatatttcttgggaaacagctttggctgcagtccttgttgcttcagttttattcattttaattactgtctttaaattacgcgaattagtggttaatgccattccacaagatatgaagtatgctatttcagcaggaattgggttattcatcgcttttattggcttaaaaaatggtcaattaattgttaacagcgattcaactttagttactctgggaaaatttagtactccagcagtttggatcacattatttggcttaattttgactgttgtattaatggcattaaacgtgcctggttctatctttattggaatgattgttactgccatcttcggtatgatcattggtcaaattccattaccacataacatcgtttctggtgccccaagtattgcaccaaccttcggccaagcggtttttcacattaaagatattaatacagctcaactttggatggttgtactaactttcttattagttaccttctttgatactgctggtactttaattggaatgactgaacaagccggtatggttgacaaggatggcaagattccacggatcggtcgtgcttttttggctgattcaactgctatggttgaaggtgcagtctttggtactgctccacttggaacttctgttgaatcaagtgccggaattgccatgggtggtcgtactggtttgactgctatctttgttggtattttcttcattatcagtatgattttcagcccattgttacaagtaattccaactactgtaacggctcctgctttaattatcgttggtgtactgatggccagcaacttaaagaaaatcgattgggaaaagttcgaaattgcctttcctgcttttcttaccgttgtagggatgccactgacttactcaatttcagatggtttggcattaggcttgattgcctacccaattaccatgattgcttctaagcgttataaggaagttagtcctatgatgtatatcctgttcgtagtatttatcatctttttcttagttacgaatttataaaaagaatgctaaagataagcagtttgaagctgcttattttttattgacttgatttttattttgtactactgtaataaatatataagacagtttttatgggagaagaaaaatgagactgtaaaatagtttgtgtaaggatgaatgattccttaaatttatttctttaaacattagaaaaaggagtacgcgtggtgctagttaaatcgttctagacaataagccaaattataagctaaaattgcaatttccaaccggctttgaaagcctatcagactacgtgctcgattgttctcggcattgtaataggtcagaagcgaaaagtcgctttcaattgttctgcgaatagccatcaattgatgatcattgtgctttttagctcctgtcatatttttacgatatggtgtccaaagttcgtaacccatttgttttagctgttgatgcagttctttgcctaaatagccttcgtcgccaagaagatagtaattagatggatgggtattttctatcagttcaactgtctccctggcatcatgaactgatgcctttgttacgacataatcaagaatgtaaccgtcatcgctaacaatggcatgaactttgaaaccatagaagtaaattttcttggtggccttataaccaatgttggcataaccgcgaaaaattttagcacgatagtttcgaattggttggcaaacaggtaccggaaagctgtcaatgatcaagaactgtccattcaggtcaacctttttattcatttcttgccgtatctgataaatcaattgcaatagctgacgtgaacgccgattaaaacgtgagtgtgataaacaattgaaacattcacagaatcttctttgtgattcaattcctgtcttagcttgccagataagtaaagccaaaatcagactgtccgtagttttaatttgatcaatatttcgccgatgagtaaactcagccggtgcatacaaacgataccagtgccgacaaattatcactaaatctttaaaactaacttgtaaatggtggctaaaacgcttaagcttaaggcagttcaatcagatcagactcttttctattattactatttacaagtcgagtctaacaagattggacttttttattaactaaaacgatttaactagcaccacgcgtaaaggagttcctttctcgtatgattggtttgaacaaaaaacacatacagaaagaagaactccttcatgaatgattttaccaaaaatatggctcaagcactattcgatcaagacaaagttaatgattttttgcgcaaggaaattcaaactgcagttaatcaattgcttaaagttgaattgactgcctttctgggctatgatccctatgccagaaatggctggaatactggcaactctagaaatggtgcttatttccgcaaagttgatacgcaatttggcccaattgaagtgcaagtgcctcgggatcgcaacggtcaatttcatcagcacacgctgcctgactacaagcagcactcggatatcttggaaagcatgattatcaagctttactccaagggcgtgaccaccagggaaatagccgatctaattgaaaagatgtatggcagccattacagtccagctcaggtatcaaatatttccaagcagatgattccaaaggttgaggcttaccacaaacgcaagctaagcgacaagtttttctgcgtctatttggatgcgacataccttcctttgcgccgagaaacatttgagcgtgaagcagtctatattgccattggcatcaagcctaatgggcacaaggaggtcattgactactgcattgcgcctagcgagaacattgaagtctggacagatatgcttcaaaacatgaaatcccgaggcttaaagcaagttgagctttttctttctgatggtgttgttggcatgaaaacagccttggccaggacttatcctaaagctcattttcaacgctgtttggttcatgtcatgcgcaatatctgcgctaaagtacgcgtcgacgatcgtgaaaagatcatgaacgaattcaaacaggtgcatcaacagacaaacaaagaagaagccacagctgtcctgcatgacttctataccaaatggggcaaggtttacagccatgttatcagaagcttgaaagacatagaaccagatctgctggtcttttataactatcccaagcagatcagagcttcaatttattcgactaacatgattgaatcatttaacaatgtgatcaagcgcaaagctaagcctaaggcagagtttccaaatgaacagtcgcttgatacttttattggcattcaagcaatgagctacaacgaacgctatttcaatcgaatccacaaaggctttggtcaggttcaggataccttagaatcctactttgattaaataaaagattaaaaaatcaatttacgagaaagaactatttacacaaaagatttgacagtttcagaaaaatgaaaatcaaaaaagtactactgaccacgtctttactcacgattagtttgattactctatcgggatgtagtttccacctgtttaccaacaagaattccggtcctacaatcaaacgaactttgtcctctaagaaattcaattcacttaaggtagccagtgacattactgatgttgaattacatgcaagtaatcaatacaaagttatctatcatgggctcaagcgtttcaaacctagcgttaatgtgaaaaatggtcagttaaagatcactcaaactagtaatggtgtttcttataacatcaaagaaggcaatacagtggcaatctacctacctgccaaagaattacaaaatatcaatattaatctttctgatggcgatatcgatgctgatggcaaggttcaagcaaaaaatgtcaaacttcacagtgacgatggtgatgtcaactttgacgatttaagaattagctctggcaaaattacctcagatgacggcgatatttcagtttctaatctacttactagaaaaggcgccacagttgaatcagatgatggtgacattcgtattagaaagagcaatgccagtggttaccgcctaacttctgacgacggtgacgtcacattcaagggagatacttctgataatgatgacggtggttcttactacaaaaatactaagagttctaacctgctctctgctcacagtgatgacggcgacgtcaacgttaactaaatttcgtcataaggcgataagtttcacatgaaacaaaaaatcaatgcatcattgataatgcattgattttttacttttttcctcattcatagcataaacacgactttacaagattatttaagtttctattgaaatagacataattttaatacgaaaaagataagactaaattctacttttccattaaaaaatatttaccaattttccattttctaagtcaaaatgatgcgtaaatttcttcatcgtcgttggtgaaatatggtggtcaatttcaattactgttaatggcgaattcaaaaagacattatgaatttgctcagcagtttgcggatcaagtgaagcagttccttcatcaactactaaaatttctctttggaatagaaaggcacgcgctaattcaattctttttctttccccacctgaaagattatgcccatttttttcaattacggtatctaagccatgtttttgaacgtaattagttaatcatgcttgttgaaccgcagccatgatttgtttttgatcaaattgtttaccaagagttaaattaaatcgtaaagtctcattgaaaatttgcgaagtttgttgaacttcactaaaaatttgcgtttcaacagactgattattaaccaaaactcttcccttctgcggagataatttacccattaacaccttaagcaaagtagatttaccttcaccggactttccagtcaacagaattttatcccctctattaacgcataaactcacatcattaagcactggactatcagcttgatagccaaaagttacattgtccacatctaattgctcaaatttgattggagcctcatcttgcttagttgttaaaggtttgaaagacaacaacttagcggtcattggtttagtggcggcaatctgattacgaatactattaatactaaagaaactatttacaatccaagcactagagtattgcacggccacaaaagaagccaaagcaacgtgtccttgaattaccataataattccgactccaatcggtaagaagtctagtgagtaagctaataaattaacgtaaaaatcactcttagcaattgtatcgtcacgttcacgtttattctcaacagaatttttgattactttactactcttttttacaaatagagataatacattgtaatttaaaaccgtattgatatttttgagtaaatccgacataaatgttacataactacctgttgatttactccaatcggatgactgcttggctgttttcttgctaaacaaactaggaataaagcttgaaagacttgcaaaagcaacgaagactaatgtcaagactacactatttatcagcgcaatagtaacgatcccaacgattttaaccacagtagatactagtgaaaataactgtctaaagtacttttcttcaatcaagttaagatcattattaatgaaagaaattcgattagaaatttctttttctcctgtttttacaaaatccgtttgcatcaaatgctcacgaaccttttgattaaatagtgctacgttacgattaattactcaattatttaagtattctacaattacaagtaagatttgtaacactgtaattacgataatcattctcaccgtatttggaatacttttccttgtaactaacgcaaagatttcggagtatgaccatgtgctaaaaggcaaagaagtccgcttaaacatgacagaataatactgagcgaaaaccatttgaggtcaataaactttttcataaatgaatctccctttcaattaagttggattcattatctgctttagttcacgataaaaatagctttctgcaaaagtgatcttcaatctgcatatatgcagattattctggaagaatagacagaatattttctaaattacttgccttgatcaatttcttaatagctaatacctgctctgtatctccagcaaaatagcattgataaaaatgaccaatgattttatataagactaaagatggcgtttgacttaattgcccaagtaaataaataggctctttattatcttttacaaatttattttcagcacaagtatataaataattcacacaaatagtggcaattgttgtttgcattttttctgtctgctcagacattttatcattataagtagtgaaaattttttgaaagaaaaaagcaaaatcgtcatgagtaaagatagaggtaccaaaattggctaacaaatctaaactaaatttatcttgaagccaattgtcgcctgcaaacaagcgttgcagtactatatttttatctttgacatcaaatttacgttttctttctagcaaggtaagaatcaacttagctttgattttcagaagatcatgatgcggcagttgttgaatttctgttaccaattttctaacttggttaaagtcttgattataataagcagtctgtaattgatcacctaaattgttttcatcgtcagcttgtgcgactgaattttgcttaaagaattcatcaaatgaaattttatttttctgcaaaattgccattaagtccttagctgatatttcatgcaatccgcgctcaatcttagaataatgggcaggtgataaaattcctgttacaaattgttcttgcgtcagtccccgcgattggcgcgctttttttaatgctgtgttaatttccatagctgtttttatttcaatttacggtcccttttagatacaaaccaaattgtcccatcagaagttgcccagtgtccatcagaagttttatgaaatttcagcgtcagtttcttactgtgtagtgtccagctatttttaccttccattgtgacacggacccggcctaatttttctgaatttattttgttattgtagtctttgggatcatatgaattatgcccatatactttataaattgcttttgctgccgcagtatttggcttaatgtatttataagtaccagatgcatcagtcttaaaaactgggctggatgcatcgatttgaccactatttttccccagagctatgttcaccaacatgccaagatgattttccattacagaatctgtttgatggggatcataggttgtaagatttttattagcaaactgttctggaatagtttgctgattgcgataaaacaaccagccaccgactgccagaactacgactactacaacagttatgattgtagctttctttttcataaaggatcacctgttatctatcagcttttttctgaaaagtaattaatccgtgtgaaactaatctaacagttccgccataataaactacccaacgtactttgccattactgtactcttcatacattctctcccgctgaagatatccattatatgtaccatcattataaggaatttccatcggagtatctacagcaccatcataagcgccataacgcgtcttatgccatgggcctgttctcttaactccatgaacttttttagttaacggtagtttttgaacgttttgaactgaatctgtactagattccgcagcagatacaacagcagtattagtggttgcaaacagagcagttgctgagaataacactaaagttgcttttcttaatttcatatctaacaccttatacctttcttttattgtttattttcattacctagttgttcattatcattgacaacaaaatttgtcatcattttctttttacttgctaatgtaggaattgggtagcttttaagtttagtattatacaaatagccaccgtacataattcctgttggattatgccccattggaacagtgtacatcttttccagatatcctctaaatacctcattgcctcttcttacagtgtaataaacataagtaccctgatcatgatagtattgacgttgataccagatatgttcaacaaatccttttgattcagtgctttgtgttgcagcttgtacatggtttgattgaaccaaagctgaagttgaaactgatactagtgataaagctaatgctgctttagctgttaaagttaaaattttcttatttcttttcataactttaacctactctttttttcttttcttgctttaattactacctaatccagacggaataggaacccatggacccatatttttctctcctttcttatttatttttcattaattttactttcactactaagaactgttcagaaattgtcaaagatgacaattttctacaataaaattcttaatcaaatgagacattccattacttttcataaattcaataatctgatctacttcttcatttttgccatcaaaacaataatggtaataattggcaactattttagcaaaagcattacgtggaatttctggcaatttagaaatgaaatcgtaaattagatttaaatcaattttccttctttgtacgtatacattagccaaataattaatagctattgctgacattatttcttgtagctgaccagacagattagatacattatggcgatacgttctaaatattgaattaatcaaaaagtccatatcttctggggcatatatcatcatagtcattgcaaaaatttgtagagtagattcactccactcatcagaatcaaagacaatttgtctaacttgtcgtttaatattctcagatatttgatcaatttgtttctttaaagatgctattgaaaataccactaaagcataaagattaaatatattctgactttgatttttatattttccaatttcaattttcaaatcttcaagtcgttcgatctgctgatgataatatgcatcttctaattgcttttgccagatcaaatttttgtgagcaagatcattttcactatcttcattttctattcgctctaaaaatatagaagcttgcaatccatgttgctttaacaaatcaattaaatcctgagtctgaatatcatttaatccacgttcaatttttgaatagtaagatgttgataacacatcccccgccatttcagtttgtgataatttcatactttttcttgtttgttttaatgcttcaccaattgtcatatctttccctccctcgtattatcatatttttcattattgtataatgttttgttaattttgcaatagtttgtaaaacaaaagcattatttttatttttcaatcttttatgtttacaaatgtaaacttagcaagtagaataaaaaatgtgaagagatgaaaataaattatttaatttggaggttacggtcatggatgtaactaaaatcattatccttgttgtcgcaatcgccttgatcggctttatcctttggtggttcttcggcaaacatgacgaagctatcggtaaagcaagtgttaatcaaggcacacaagaagctaacatcgtcgttaacggcggttactctccttctaccattgttttaaaacaaggcgtaccagctaaggtgaattttgatatgcaagactctaccgcctgcttatcgcacgttgtttttgaacaacttggcgttaacaaagatttaaccaagcaaaaaatcactacaattaatatcccgactgataaaaaaggcacttataacttcgcctgcggaatggatatgtttcatggaaagattgaggtcaaataatgagtattttttcaaagaatcaaatcaaaaaagttgtcgttaatgcagataatcacggttacaagccagatgtagttaccttcaagcaaggcaagcccgcacaattgaaatttatcccatcagataatatgggctgcatgaatgaaattgtatctaaagacctgggcttcgatcataagctcgatggtcaaaaagaagttgtggtagacatccctaccgaccacgcaggaacttataattacgcatgtggcatggacatgtttcatggaaagatcgtagttaaataatgaaattatctaatattcagcgtttctggatctcctttgtactctccatcccgatgctcattcagatgattgccatgccatttcactggatgatgccaggatacaactggattgcccttattacgacaaccattatcatggcaatctcagctgcaccatattgtaagagtgcttggggcgccttcaaaaagcataacgctaacatgaatacgctagtggccgtcggtactgctgtggcttacttttacagcatctacgctatgttcactggccgcgaagtttacttcgaaagtgctgcttatgtaacggtctttgttctacttggggatgccatggaagaaaaaatgcacagcaacgcttccaacgcactagccaagttagtcgacctacaagctaaagacgcagcagttttacgttacggtgaatttgtcaaagttccactcgaacaagttaagccgggtgatacaattcgcgtaaagccgggtgaaaagattccggttgatggtgtcatcactgatggctcaactaccatcgacgaatcaatggtcactggtgaaagtatgccggttactaaaaagaaaggcgacaatgtcgttggctcaacgattaacaccaatggtactttcacttttaaggctaccaaggtcggtagcgatacgatgcttgctcagatcgttgatttagttaaaaaggcccaaaccagtcatgctccaattcagaacttgaccgacaaaatttctaatatctttgtcccagtcgttttaattattgcaattattaccttcgtaatttggtatgttttcttaggcgcaacattggttaatgctatgctcttcgccgtttcagtagtcgtaattgcttgtccatgtgcactaggtttagcgacaccaactgctttaatggttggtactgcccgtagcgctaaaatgggcgttttaatcaagaacggtgaagttcttgaagaagttagcgacattgataccgttgtgtttgataagactggtacaattaccgttggtaagccacaagttactaatgttgtaggtgataaaaacaaggtcttaactattgcagctagtttggaagaaaattctgagcacccactagcaaccgctgtagttaaagctgctaaagaagcaaagactgaaattaagtctatacaaaactttgcagctattgaaggccgcggagttaaggcaaactatggcaatcaagaagcttttgttggtagcgatcgtttattagaagatatttctatttcccaggaaatgaaagatcaggctctccaacttcaaaaagaagcaaaaactgtagtctatgttggcctaggtaatgacatcattggcttaattgccattcaagatgtacctaaagcaagttctaagcaagcaattgcggaacttaaaaagcgtggtttaaagacggtgatgcttaccggtgacaatcaaaatgttgctgaagctattggccgtgaagtcggaatcgaccaagtaatcgccggtgttttaccaactgaaaaagccgctgagattaagaaattgcaggatgaaggcaataaagtagcctttgttggtgacgggattaacgacgcacctgcattgtctacagctgatgtcggaattgctatgggatcaggtaccgatattgctattgaatctggcggtatcgtccttgtacagaatgacttaatgggcgtagttagagcgcttgagatttctaagaagacctttaacagaattaaattaaacctcttctgggctctgatttacaacacgatcggcattcccattgctgcaggtttattcatggcctttggcgtgcagcttagtcctgaacttgcaggcttagctatggccttctcttctgtttctgttgtaactagttcacttttattgaataaaacaaaaattgctggtgaaacagctcaagtttcaaagtaaaataattctccgaccggatattttaatccggttttctttttgtaaatttttcaatttgcgacttaaagtttcagcagtaatacccaaatatgatgctaagtctttcttttttaactttaattccacatttttactcccctgtttttgagctaagtcttgcaaataggccattaagcgttcctgagcatccattgaattgcgccgaatagagttagtttcgattgtaaccagctgctcgccaaaattattaagcaaattcaatgctaaatctggcgtctttttcaataacttttgaaaatcacgacgctcaatagaacaaacataagtatcttgtaaagcctgcacaaagttttcctgggcatgttcttgaaaaagattctgctgtccattagcatcgccttgattcagcacacctaatacggtctctttaccgtcttcgttgagattgtaaatcttggcactgccttgatccataaaaagcattccgttcttaccatcacctggttgtcgaataatactgccttttggaaaatattcttggtgcgttgaaattggtactagtttttctaacatttcatttggcaaatttttaaatatggctgctttgcgaatacaagccatgggtgaatgttgcataaaagcctcatttcttgatctaagtcaatttatttttatctgcatcttaatacaatgtatttaacaactcaagcagaaaggaaatattaatcatgactaaatacatcgcacatattgagcctttaaacgctgaaaaaattggtactaaggcacacggtactgccacttttgaagaaaaaggtgatcaactacatattcacgttgagatgtttgatactccagcaaatattgaacactgggaacatttccatggcttcccgaatggtcaaaaagctcatgtaccaactgcagctcaagacgttaaccatgatggctttattgatttaccagaaactgagccggtctcaggaactacaatggtgccacttgatgatgccccagaaaacatgaatattcctcatgatggttatcctgttgccgacagtaatggacattatgaatatgagattgatgtctcattaacaaagctacaaaagaaattcaaagctgcctttggtagcgataaactacaactagacaagcgtgtagtttacgttcatggtgtacctgcagatctggaattacctgatactgtaggtggttgcgtaatgagttatgatgcccatactaccttgccaatcgcagctggtgaaattgaaaaagcttaagttaaaagccattccttgtgaatggctttttgcatcctttcttattttttgatagcatagatatagattatgtaaagtatctaagaaaaggagatgttttataagtaggcttagatcctactcttatggagaataacgaaaaaattatccaagaaaagaaacgcgaaaaatttattaaaactaaaaagaattacaagcgtgcaccactaatgtcagttcacttaagagtgatgatggccgttatcttaggtcaaatcgcctgtggctattccctgggaattagtggtaccgctctttctaatgcagctaaatatatcaacattagtgacttctggactggattaattggggctggtgctttaattggccttgctggtagtcttttggtcggtcgactttctgataaaatcggtcgccgtaaactcttaatgtggaatatgtatatattagctgctttttctttattacatctaataaccgctaattttagcttaacctttatcctccgtattggaattggtttaatgattgctgttgactatactgtagggaatgccttgttaaccgaatggctacctaagggtgaagacagcaagcgccagagtcatttattaatctactggactattggttttattttgtcttacctagctggtagttttatcactggatttgatagttatacttggcaaataatcttagcaacaagtgcagtacctgcactagtaactgctatcttcagaagtcttttcccactccctgcttcaccaggctggctagcaagtaagggtaagattaagacggccaacaaggtcattcgtaagcacatgggacgcaaatggagattacctgcccgctttatgaagcggaataaaaagaaaactcctagaaatatttcctgggcaattttattttccaagcaatatctgcgacgtactctagtaggtgggattttctatgcctgccaagccttctcatttttcggtattagtatcttcttgccaattttattacaaagcatgaatatcactagtggaaatatctcaggaattatctacaatggtgggatgttcattggtgtgctaatcggtacctggatctttaacaaggttagccgccgcttctatcttatcagtaattttctaatctcaggtctgctaatcggcattttagcaatagtacctaacttaaattcaatacttaaattaggtatttttacgttatttgcgattattttatcagctggtttgatcctagattatccttatccgactgaattatttgatctgaaggtacgagcaactggtgtaggtacttgtattacaatcagccgaatcggggctgccgcagggactttcttattgcccgtcttaactaatgtgggtggtgctagcctggcaatgctagtttgtgcgattgttttactctttgcctttatcgtttgcctcatctgggcaccggagacctcaccccaatttatgaaaaaataaaataattaatatgctacacaaaaagacagattacatatgatgcaatctgtcttttcttatttcttatcttttttcttcttgtccttagaatccttatttaataattcttctggatccttatgcttaggcgtcttctttggatctggtacagttgcaaagcgatcaagcatcttctgtaagttattagggttgtcaaaagttaatcccataaaacatcttcctttcgttttctcaattatattaaaatttcaattcaaatgacaataattttaaccctcattatcaataaattgttgcatcttaatcatttctgaaccagccagatcaacactaattaaatcactataatcatgaacactagtatctcctaaaccatattcagttacaatttttaggtcgaagccactatcagagcgatcttcaattaagcctaaacgatcaggataatgataaattgaatcactaattttcactatttgatcttcgggccaattatcaataatttctgctggtgactgaatttcatcccgtaatttaactgaacgctccagcctgtccggatcaaaactgccattatttttttgccattgaactaaaaaattaaagaagagcaagcgctcggaatcttcagtaatatgcgttatatggctcctagcaatcactgcaattgattcaacctgccctaactcattgatgctctcgaataccagattatcatcgtcatacttgagtactttaccaatagcaaaactaccatattgatcatcaaaggtataatcaaaataaatttcaaccagatccaagtcgttagtgaattcttgcttctgtgattgccgcaaatattgggtaaataagcgattatcaatggcattagtatcgacacaaacaatatcgtcaagtggtataacggtggcataatgctctaaagttaattcattgcgttctaaaatacgcacctcttgctgatcaagttgagtaattaagccagtgtaagtagcacctgtattcacctcaaaagttgtaaagggttgcgcgtcagctacgttaatcagtaaatcatgcagattagtaaaatcccaggctaacactgtcttatttaattgctctaagttaaatgaatccttaacttgggtaatcatataatagcgtagattaggcgtatcgtcttcaatcttagctacttgatcttctttaataaagactattccacctaaattaccgccttgatcgactgattcaaaggtaatccagccatgatgttgcgtgataatgcggccaatatagtaagaatttgcatcaactaccgtaatacttgcatccccacctaagttatatttttcttgatcagccttaagcgtgatttgtacaagtttattcaatttttcgccccctcttttttcttccgtgaatttaattgtcgcctaatcattatttttctgcaagaaaaaagaagatggtttagccatcttctaatattgagttaattctgtagaattttggggctaacgaatattacttcttttgtgcagctgcctcagcttctgctgctgtgtttgaaggggttaacgaagtactgtttggatcaaaacgcacatcgcttgcttttacataaccatcagcaaattggacttcaccttgattactatagacagatttaccaactaagtgataaaacagttctgccttattttcacttggtacccagatgtaaagcaacttatttaccttgtatcttccaccttgttttctaacttgatcgcccttgaagtcaatcttgtttccgttagcatcatagatatcagttggcttaataaattgaattagtgattttttagtatgataataattttgaactggaatatctttagcagctttaacattgaaattataaatccaataatcagttcccttaatatgatagattgctaattcgttgtcatcgtcaccatctctaccagtatcagcacgtgtcccttgctctaaacgatccactgtaaacttatcaccttgttttgcgtattttcctgaaggctgaactgcatctttatcaggtacttcaacaaaaagagcagcacgtttatcagttacagtaacagtcgtttcttctgatttagttgtttgagacgaagaagaactagtgttgttatttgtattaacactaattacaggacctaaattataagacttaatgtactgtttattaggtccacctattctaaagtaatgctttccgttcttaaatttgtatgaaccgccataagtcgtgatagtttcacccttatacaatttccaacggttattgtaagaggttctgccagttgaggtacgataaatgtaagtattatgagtaatcttacgtgttacaccatcaatgttggtagcctttatgtattgatccttgccgcttactttatagtaaagcgagccgtcaattttcacagggttgctttcaacagtgacatattgataggcattgtattttacacctgtgctgttaccatccttgtcgtaagctaaagcagtatgcataactgctttagtcgtagcagcttgtacttcattagttgtattagtcaaaacagccaagggtgcaactgtcattaatgtagctgcagaaattaatgcaatcttatttttcttcatcataatcatccttttcaaatctctacactgctattatattctctaaagctaattaaagcattaaaaagaagccaattaagtgaagtggacttctacttttgatattttcttttaatttattttttcaatgccgttgcctcagcttctgctgctgtgtttgaaggggttaatgtcaaacctatattaacaaatttaacatcactagctttaacataggcatcattaccaacttcaatttgatcaacgttacctgtagcatagaacttagtaccaactaaatggtagaataattctgccttgttttcacttggtacccaaatgtatatgagtttatctactttcagatttccaccttgttttacaatttttgcgccattgtggttttgcatagtaccgtcagcattatacacatcagtatccttgacaaatttgatatagccataatgttcgtgatcataatcatgctttactaattttttatcggcagttacatcaatagctaaaagccaattgtctgtaccttttattctatacattccagcttgtgctgcagttgatggaaaatgatcagcaaacggagtaacttctagtttatctacaataaacttcgtaccagctttgagattctttttgattgctttaccttgattatcataaatatttacaccgtaagcattttttacggtaacagttgcttcctcggcattagtattagtagcgttgtttgattcattgctggttaaatttgatgcagtattagtactaataactgggcctaaattatatgatctaatatattgcttacgtggcccacctactctaaagtaacgtttaccgtttttaaatttatatgatccaccatatgtagttacggtttcacctttataaaatttccatttcttactgttggcagtcataccataaggtgtcctttgagtagaagtccggtatatataagcattatgagtaatctttcgggttacaccatcaatattagttactttgatatattcatctttatctgtaactttgtaatattgacttccattgatagttactagttttggatctacatgaacactaccataaacgtaatatttatgaccggtactatttccatctttatcataagctaatgcgttgtgcataatagtcttggttattgaagaatctgcttgtactgtatgagcgctagttgtagtactcaggataggtgccgttcccattaaagctactacagaaattaacatgattttattttttttcattattaaccaccctttgaaaatctctatacttcaattatcttactttgtataaacttagacaacaaaaatagcatcaaatcatattgatttgatgctattaaggctaaaatttacaaatttagtcccaagctaattcataaaccttatttgaaacagttttatttttaccgttaacattagcatggtatgcaacagttaagtaaccgtgattttcatcaataatttggatactttcaacttcactatgttcacctgaaatatctaatccaccaaatgcacttaagtttacattttcccattgagattgatcattacgtgcataaaacggaatttttacaatttccttgtgatagtatgaccatgaaccattacttaaacttggtgatttttgactagtaatataaatattaccagaattatcaagatcataaccttgtacagagtttaaaacagatccatacaaaccatatactgtaaaactagtttcacattgataatttcccatatttacgaaaccattatttccagcctcatctaatgcattattaatgacatttaggtcataaattgaaaagtggcctgttccattattctcaatagtagcaattaaaagcatactataatctggtgaaactgctacttcagcgcgttccatttcatcaccagagcattgatcttcaggattacctgcgcggttcaagtatgctaaacgtgggaattcagtatttgatgaagcatatgatttgtatctaatatctgctcgagcaatttgagaagcccatttattcttgtttttagtaccaacgaaccatttaccagatctacctgaatattcccaagtttgggtgtgtccagctgctgcacctactaaagtaagcacaggggttgtcacgttgccacggaagccacgcaatacatgtgtttctgtctggttatttcttaactgtaaaccataaacatactttgatcctacattacctttttgaactacagctctgtaacctgtattcatatcgaatctatctaaaattctaatatttgttgcatctaacataataaaacctccgaaaaatttaaaaactactacttatcctgagtttgctcattcatctgtttagccacttccgcaaagatgtcctgcacttcttgcctgttcagcttgaagccttttgcttcaaggctgttcactactgcgttgccaacacggttaatcttctgttcgtcagaaagattttctttgtcgtataagcgtacatagcttttcattaagctatctgcagtattgcggaattgctctaagcgtttattcttgaaatgaactctgctcaagatgccaatacctactacgctaattacccataacgccagagtaatcagctcaacgtaatcatgaatatccataattgaatgaatcacctctcttttgatcaaacgatccaagggggctaacgaatgtccattggacttcacctctgtttgataatgttcaacaagacactaatacacttgatttatattagtttttagactaatataaatgtataagaaataaccgaaagctggtaaatgttccgccaagaattttattaacttaggttgttttctttttcatatctcgttgacaatatttactataagttaattaactaattatgtcaataaaaaaagctaaaaaactattatttttttcgaacaagtattcttgaaaggcttggtatgattgagttagagcgcacaaaagaattagcaaaaaaatacaaaatgaatctccgtgaagtaaatgacaaggcaggtttaggtagaaattccatctataattggaagaatcaaagaccaggaattgatgcacttaatgcagtcgcagatgtactacatacgtcagccgattatttaagtggtaagacaaacaatcctagcccgtcacctaaaggtgatgaaactggtggtatttctattgatggtgaagtaccatatttctatcatggctacactattccagaagactacctgaacatagttcgtcaacttatggaacgtgatatcaaaaaaggacttattaaacgacatgacaacagcagatcagaataaacaagaactcatagactggttattagcctatgctaaaaaacgtgatattatggttgaattagttgaagtaaatccaacttacccatccatttctttaaagaactatagattcgctgtcattaatactaattggcatcatcaagaagaagtaccattttcaataggtcatgagattggtcacattatgctgactaatggtgaagtagattctcgtcaatatatcacttttacagaacagaattccgaagaaagtccagcagacatcttttcaataaagctaatctataattactcctgcaaaatgggtgattgcttcgaagatacaggtttatttatgcaagcatacgggataccaaatcgagtagctgatgcaactaaagagatatttaagcgagcagcttaaccatcaacttctatattgatttgattactaaaagttttagcattagtttttacactacttaaaatccaattaaacaaaaaatcgctactcaattgagtaacgattttttctatccatccagttcaacgccttgcaagtccttcatcttgctataaaccgcgccacgttgacttgaatcaaactccagaataagcatatctccgccgcgaattacggtttgaccatttggtatgatctcatctccatcgcggtgaattgttcttaccctagtatcaaccggccattgaacctcagaaatggttttatcaaccagtctactgctctcatagaccggcagagccattgtatcagcctgaccagtatagttagccttatggtcactactcttgtccatagcggctgctagaagcccgtagataggcttaccgccaagaagttcatcaactaataacgcaatgaaggccaccacagctaatggcatcaagtgaagtaaggaccctaccatctcagtaattaagataatcgccgtaaatggtgcacgaatgattgctgcaaaatatcctgccattgaaaaaatcactaggttaactactaaacgctgcggtaacaagcctaactgtaccatcatcagtccataagttgcaccaatcaaagcgcccattgtcaaaattggcaggaagataccactaggaagacctgaatcataagcaacaatggagaaaacaattctcatgacataatagaaggctagcatccctacaatgccccaacctgttttagtgattatattcggcaatgccagaattaaccgattacctggaccggtgattaatggccaaaagtaagcaatcgggattaatattgccaaaggaataagtccatgcagccaacgaggtaaaatggtgattttagcatagaccttctttaaactaaataaaccaactttatataaatgacccaataagcctaataaaatccctaagataagcaagtgccagtacaacgaaatcggaaatgaatagttatattgaattgctagggcgtgacgaatgccaaacaagtttgaaacgacaaagtttgaagcaattgcgccagctaaagcattcatccaaactaatggtgaaaagttatggaatacttcttctaagacaaacaaggcaccactcaaaggagcgccaaaagcggcagacaaaccacttgaagcccctgttgcaagcagaattctagtttttaatttgttctgcttgcatccctgagcaacaccttgaccaattgtcgagcccagctgcaatgatggtccttctggtcctaggaatagccctgtgccgataaccaagataccaccgattaatttccgccataaaattggaaaccattgtagtgatagcttcccttgcagttgcaattttacttctggaataccagaaccaccaacatggggatattgtttaacaaaataaccagcaattaccgctaccgcaataaagccaatgataatcgcaataaaccacaacggattctggtgcgctaattgaaacaagtataaccaaaaaccagatgtcttttcgattccaaatctaaataaaccaactactacgccggtacatattccgacaagtagtgcttggagcaacagtttaatattagttctgtttgcctcgtctttcattactttctccctcacaataaaaaaaacgtgtcacaaactattgtacaacaaaaagccagctagaaatgttccaatgtcattaagttaagacattgacaattaagggtgcttttttagagatcgaatcatttggattcgatctctttttttgtataaaataaaggcgaaaagaccagccttttcgcctatcttatatattatatattttaaaccttcaaaattattgccagaaagatggtgttaattatgaaagcccttcataagaatattctagaacgtcttgatcaaattatcaataatactggggatcatattcacgattttattaataatcctcatgcttttaccaggaaacgcactttagatgcagcgacagtccttaaaactacaattaacatgcaaggtcagaatttaaacagtgaactctttagagcttttggcgaagatgcaactaaaaagaacgataaagtagttagtacttctgcctatgttcaacgcaaaagccagctttctcctgcttgttttaaacatattctgactgtttttaatcaaaatctatttaatattcaactttttgatcatcactaccgtttgtttgccattgatggctctgactttaatcaaatctggaatccgaaatcgaataacattgtacaagcttcttctcataaaaagaaaccctattgtcaaattcacgttaatgccttatatgatctattgaataatacctaccaggattgtatttttcagcctaaatcagaaatggatgaacgcaaagcggctgttcaaatgcttaaagctttgaattgtggtccatatattgtaacaatggatcgtggctacactagtttcaatatgattgaaaactgcaatcgcctgcctaactgtcattacataatacgaactaaggctggacaaggcggagttaaagaaataacgacattgcctgatcaagaatgtgatcgtgagatttcctgcctggtaactacttctaactattactacatcacgcataaagccagtgagaatattcaccatgtccagcatcattatcgccaatatattaagtatcgctctaaaaatacccaggatctaagctgggattttggcgagttatgcacaataaaatttcgagcctgcaaatttagaattaatgatgccaaatcaggcaaagaagaatgggaagttgtgctaaccaatcttgatcgaaaaaattatccgctaaaaagaattaaagagctttatcatctgcgttggggtattgagacctccttcaagaaattgaagtattctttaggcagtgtacagttccattccaaacaagataaatttattgaaatggaaatttatgcccatatgattatgtttaatgcaatcagtcaaattgatgcacaggcctatattccgcaaaagcattgcaagtatcaatatgccatcaatttcaagcaatcatgcttgattattcagagcatgtatttggcttcttctttaacgcaagattttgaacggatccttattcagatcagctattataccattccaattagaccaggccgcaaggacaagagaaatattaagcccaaatcagctgtatattatttatatcgcgtagcttaaaaaagcagaatctgtgctatgccttatttgttgtacgaaaaaagcaccaatttaaccaattaaatgttaaatcagtgctttaaaagtctaatattaattgtcaatgtcttaacttaatgacattggaaatgttctaactgacttttttgtttcatgtgaaactaattatttttcttcataccattcggtgtggaagacgccttcacgatcatttctaaggtaagtgtgcgcaccgaagtagtcacgttggccttggatcatattagctggcaagtttggattaaagattgattccaaccagttaagagctgcgctcaaagttggagttggcacaccacacttagtagcaaattcaactgacttacgcaaagctggcaagttttccttcatcaaaccgcggaaataatcgtcttggaataggttcattagcttgccgttcttgtcataggctttttcaatatccttaagcattgcggaacgaatgatacaacctgcttcccaatcttgagcaattgacttgtatcttaagtcccaatcataagcttcagcagccattgtcaattgttggaaaccttgagcataggcaacagcttgggctaattgcaatgatttttcgaatacgtcaaccatatcatcaggaatttcaccattgtattcaaacttagttggtttaacgcccttttcaattgtcaagtgtgcttgcttactcatgaaacgtgccattacagcctcggctaccaccgttacaggagcgccaagtgcaacaccatcttcgagcatccagttaccagtacctttgtatgaagcaacgttcaaaatgtgatcgattacgtgatctggcgttaaatcatctttttgtgccaaaacctttgaagtgatttcgctaagatatgcttctaccttaccatgattccatttatcaaaaatttctgacatttcatcatcgctcttgtgagcaacgtcacggagtaagttgtaaacttctgaaaattcctgcataataccgtattcgataccattgtgcaccattttgacatagtgaccagcaccttcaggtcccatgtagtagacacatggcttgccttcagtattcttagcggcaatagcttcaagaattggagcaacttccttataggctggttcatcaccacctggcatcaaagctggaccattcaaggcaccctcttcaccaccggaaacacccataccaataaaatgaatgccgtgcttttccatttcgtggaaacgacggttagtatcgtgataatttgagttaccaccatcgattaaaatatcgcctttatccaaaagcggcagcaatttttgcaaagtttggtccactggatcgcctgccataatttgaatcaaaatcttgcgtggcttttcaagtgagtttacgaactcttcccaggtgtagcaaggctttaatttatcatcttcatattttgcgaaagcatcaacttctggtttgtcgattgagaaaccggaaacggagaagccgtggtttctaacattcaaagcaaggttcttgcccataacagacaaaccgataacgccgaattgttgcatgtttattaattcctccattaatcaaagttcatcaagtattattatacgttctagcacgcaaaaaagcgaaaccaaaaggttccgctttttaaaatctagttaataatttttttgttattgggtaaaggtgtttcacacactgctcggtaatatttcctaggaaatattacttttattgatcaataccccaaagtaaaatgttaaatgctaatggtaatgttagcttggtaatgtatccatcctttttagcctgttttaaagatgctagaacaaatttacgttgttgacccgttagctttttggctactttaacagctaaattaaagtcatactcgttttttctaatagcatttttgataactatctttgcccacagaaataggttgagaatcggagtttacagttacaatgtagctccacttgctaagtcgaggaatatttttaattgttatagctttatcaaacttagctactgcagttgaattgctgttgtctgcagcgttggcagtgacagacgatgctgaaaataatgctgcaagtaaagcagtagcaagtaaactaattagagcttttttagatttcataatttagcatctttttacacatagtgcttattggctaataagcattaattcatatccaacactgtctattataagcatctgtattctatttactagccaacaaactattttatatttaaaatcgtatataaaatgaggctatttccccaggaaatattttcccatacaaaaaaagcgggacaaacgtctcgcttctttataattactcaaccaaattagtgttgtgaagcacctgaaaccgtatcaggagcaggatcctcttctggttctgattcttcatgttgagatgcacctgttgcagcgtcagcttctaagccgtacttttctgcaaagtaactgaatggcttcaagtcttcagcttgatacttcttgacaaaggctgggtcgtcaagtgagttcaactcagttgagtaaggcatttcgtgagtgtacttgacgtcgatcaacattggaccgtccatcttcttgaattcgtcgacagcatcttcgaattccttcttggtgcgaaccgttacacccttaacattcataccttcagcaacctttgcccagtcgttatcagggataataacaccagataatggttggtgagattcatcttcttgttctgcttgaatgtaacctagtgtttcgttagtaaatacaatattcaaaacatgcatgttgtaacgagccatagtaagaagttcttggttcatcatagcaaaaccaccgtcaccagctaattgccatacttcacggtctgggtaaacagttgctgcagtaagagcagctggagcaccataacccatagttgcgtgcaagcctgaagtagtccacttttgatcatcatgcaagttcaaaagacggcatgagtcaacgttaacgttaccaacatcaatagcaaagatggcgttgtcatcagccttcttgttgataacatcccagattggttcaggacgtacaggcatttcatctgagttcttaaagcttgcttgccatgcatcccagttctcacggtctgcaatagcagccttgtaaagtggtgattcgctacgttcttcaccagcgtcaataattgctctcaaagccttcttagcatctgcaagcattgaaacatcagttgagtgacgcttaccaaacttagctgaatcaacatcaatttggataaccttagcgttcttagggaaccataaaactgagaatggtgagttgttacctacccaaacaactaagtcagttgcgctttggacttcttgagcagccttaggtccgatacggccgatagtacccatgtatgctgggaatttgtcttctactacacccttgcctaagtatgatgacataataggggtcttgaacttttcagcaaattccttaacttcttcaccagcatcctttgcacctaaaccaatgtacatggttgggttcttagcttctttcaaaagcttaacagcttcttcaactgaagccttagttggtgctggataattgtctgctggatgagcatccttgtttacacggaaggtgtcatcaatcttttgccaaccgtagtccttaggaataatgataactgcaggaccctttcttgcgtaggcttgacggatagcttcatcagttaaaattggaatttgttcagcggtcttagcttggcggcaccaaacactagcgttcaagaaccacttgtcttcatcaaaagcttggaagaagtcaatatcttgacggctagttggaacgttagcaacaattgctaccattggagtcttgtcaaacttagcatcatacaaaccattgaataagtgggcagcaccaggaccagctgaaccgaaacatacacccaacttaccagttaacttatattctgcagaagcagctaaagcaccagcttcttcgtgacgtacttcaataaatttcatcttatctctaaagtcatagatagcgttcatacttgagtcgaatgaaccacctgggaaaccgtagatatgatcaattccccaatcgtaaataactttaagcattgcatcagaaccattaatttttgtcatataagtgcatctccttaacttttgttctttcataatgtattaaaacactttttttcacatttgcaaaccgataaaatcaccgttattacgcaaatgaaaacgcttttgtaataataatcacttcacaagctttaccaaattcaatatctcaaaaagctgaatggtagcgttttatattgtgatttgatgaacattattatactaaatttcacttattttatgtatattcattgttacttatagtaaaaatttaagaaaaaattttttacaatttatttcatagctatccaatttagaaaaacgttattttataattttgcgcataaaaataacgtagaatactattcctacgctatttttgtgctattctactttttcactctagagtaacgcccattttgaatgtaaacactcaagattgccaagtcagctgggttaactcctgaaattcgttctgcttgagctaaagtttcaggacgaattttttcaaatttttgccgtgcctcagtagctaaaccttcgatttggtcataatcaatatctgctgggatttttttggcttcttgtctctttaagcgagcaattctggtttcttctttcttgatatagccagcatacttgataccaatctcaacttgttctttaacgtaacgatcgcctggaactttttcaccagttaaccgttcaatatcagcaatagtaacattagggcgacgcaagaaaacatcggccttaacaccggccttcattggttcctgaccaatactttgcaaaaattcctgcacctcatcagttaaatgaaccgtaatttcatgcagtctcgtctttgcatcttcaatcgcatgcttcttttcttcaaatcgtgcgaagcgttcgtcagaaattaagcccagatcatgaccatattcagtcaaacgcaagtctgcgttatcattgcgtaaaatcaaacgatattctgctctactagtaagtagacgatatggttcattcgtccctttggttaccaagtcatcgattaacacgccaatgtaagcatcgttacggcctaaggtaaatcctggcttatcttgagcagataatgccgcattaattcctgcaattaaaccttgaccagctgcttcttcataacctgatgttccattcatctggcctgcagtaaataaatgctttacgtttttggtttccaaagtatgcttcaattgccatggttcaaccacatcgtattcaattgcatatcctggtcgcatcatttccgcatgttctaatcccgcaacagaatgaatcatctttaattgaatttcttctggcattgaagttgaaaagtcgcctacataaacttccttggtagtctttccttctggttcaaggaaaatttggtggcgatccttatctgcaaagcggacaactttgtcttcaattgaaggacaataacgtgggcctacacccttgataattccagagaacatcggtgcacggtcaagattgtttctaataatcgtgtgtgtggttggattagtataagtcatccaacaagaaatttgtttttgtaaataatcttcatcacgactttcatatgaaaagtgccgtgggattttatcaccaggttcttcctcagttttagaatagtcaattgtattgccgttaacacgtggaggagtaccggttttaaaacgacgcagcttaaaacctaacttttctagattttccgacagcttaattgaaggagtagtgttatttggacctgaagaataagtcaattccccaataataattttaccgcgagccgctgtacctgtagtcaaaacaacgcttttagcatgatacttcgcaccagtattggtaatcacacctttgcagacgccatcttcaactaccaattcatccacgatagcctgacgcaaggtcaagttgggcgtattttcgatcgtatccttcatgtgttcatgatattgccacttatcagcttgagcacgtagcgcacgcacagctggccccttacccgtatttaacatccgcatttggatataggtagcatcaatgttctttcccatttgaccacctaaagcatcaatctcacggacaactgtccctttagctggtccaccaacagatggattacatggcataaaggccaccatatccaaaccaatcgtaaccagcaaagttttttgtcccatgtgggcacttgccaacgcagcttcacatccagcatgcccagcaccgacaacgattacatcatattcatttgaatcatatgttttaaccattttcatcctactttcctaaacagaattgactaaataattgcgtgattaattcatctggggcactttcaccagtgatttcacctaaagtatcccaagcaccagtaaaatcaatttgtgcaatatcaacagggacgccatcttcaactgcttgaattacatcttccaattctttcttagccttatgcaataaggaagcttggcgttgattggttaccataatttgatcattagaattttcaatcccagcaaaaaatagcttattaatcaattcttcaagcgcatctaagttttgttctttcaaaatcgaagttgaaataacatcactacccgttagtttctccatctcagtagttgttattttttgacctaaatccgacttatttaagatcacgattcgcttcttgtcctttgttgcttcaattaaggcttgatcttcagctgttaatgcttgactagcatcgattaacaacaagaccagatctgctcgctccaaggccttttttgatctttctacaccaattttttccaccttatcttcagtgtggtggattccagcagtatcaattagctctagcggtactccttttacagacacatattcttctaacgtatcacgcgttgttccagccacatcggtcacaatcgctttgtcgctttgagtcagataattcaataaagaagactttcccacattaggacgaccaacaattgcagtagccaaaccattgcgcaagatttttccttcttgtgctgtcttcaataagcgattaattttatcaattactgatctagatgtgtctgccatctgttttgcggtaacagtatctgcatcatactctggataatcgatattaacctcaacgttagccaaagtattcagaatttcctgccgcattgcctgaatcttgtgtaacaatccaccagctaattgaccaacagccacttgtcgtgccttatccgtcttggcccgaacgatatccatcacactctcagcttgagttaagtcaattcgtccgttcacaaaagcacgtttagtaaattcaccaggatcagccattcgcgcaccgtgactcagcaacaattgtaaaatatgattagttaccacgattccgccatggcaattgatttctacaatatcttcacgtgtaaaggtcttgggcgcacgcagcactgtcaccattgcttcatcaatcgttttcccagtatccggatcgataatatgaccatagtgaatagtatgtgtcggcaccttgcttagatcttcgcctttaaaaacctcatcagcaatcttaattgcatcctcaccagacattcttacgattgaaattccgccttcaccgatgggggttgaaattgctgcaatagtatcgaactctgtcaaagtttgagccataattcttcccttttctcaataaaaaaagcgcattataccaccacgaataaccatgatggataaagcactttgactactttatctaaaaatcattttagactaatattcttttatttctttttgcgtcctaaacgcttgtaagcccttcttagtttacgtttgcgttcacgctcagcctcagcctttgcttcttgctctcttctatatttaatagggttttgcaagataaaggtttgaagcgcctggaacaagttggaaattacccagtaaagtgtaatagctgactggaagtttaaggccatcacaccaaccatgatagacattccgtacatcattactttggtcattccattttgcgatgattttggcgtcgataattgactaatatacgtcgataagaacgtaaagatcattgctaaaataggcatgatgtaatatggatcgggcttgcttaaatccatccataagaagcgcccagtttgtaactgcggtgtacgtaaaatcgcaccatacagtgcatacataactggcaactggatcaggacaggcaaacatccagtataaggatttacgcctgcttctttataaagcttgttagtttcttgttgtaataatgttcttgattcagtgtcacgtcctggatatttcttacgcaactcattaatttgtggttgaatgctttgcatcttagtagtacttcgaattgaaatagcattcaaaggtactaagatgacacgaacaatgacggtgaagacaataattgcccagccataactgttccccattaacttagctagccccaaaataaaagctgacatgtaataaacgatccaacggtcccaccaattaccacttgtatgtgagattggcgttgcttgaccatttgctcccgtagtagcacatcctgtcaatacaacagcaagtattgctactgctaagactgcaagaagacgtttgacatttctcttggtcagaatgtccttcaatctatttttcctcaactttatctggcatttcttcaataatatgagctaacgataatgcgtgaagcaagtttttacgcacctgagccatattaaaatcgcgagcataaggtcgcgtaatgattaaaaaatcaacatgcggattaatctgcaatttttcttcatcaatcacggcccgaatataacgcttgagtcgattacgtgcgactgcggtatgaccaacctttttgcccacagaaattcctactcgaaagtgtttattttctgttttttctaccttataaatgacaaaagctcggttagcgactgagtcgccagattcgaaaacttgctggaaatctttttcagattttactcgataagactttctcaaaacgtttcattccactctagtagactaaaaaaaccactgggattcagtggtttaagcagataagacttttctaccttttgcacggcgtcttgctaaaaccttacggccatttgatgtgctcatacgcttcataaaaccgtgaacacgtgaacggtgacgcttcttaggttggtaagttctcttagttgtcatattaaactgcacctccataaatttttgtgccaattgcacaatgtcttattaaggatagcacgaaaagccataaaaaccaagtattttaagaaaaaaagacttttaaatcccgtgaatattttctaaaaattcattgtttttcatgtggataaaaaataaaatatttttcttacgtataatttccacaagataattcccaacgttttccacaactcacatggtgttaaaaacttaattcacaccatgtggataacgcatatggtattttacctcaagtattgatagaatagtatccataattcacagctgtactgtgcataaattaacggttttgctcttatcatgtcaaaatgtgcatatcgctttaatagttgtcaacaggctgtgtactttgttgatttctttttcacctgtggaaaaccagttaagtaaatggtaaaataaatttgctttttactaactgggggaatgtaca

SEQ ID NO: 13 - DNA, 21142 bp, Lactobacillus crispatus
  source 1..21142: mol_type = other DNA
atgaatactccagctggtcaatggctacttagagaaattattgcaaaaattcaaaataagcattattcacgttgtgatgtagcttttgatatttataatgattctgagattcagtattatcaggtatggcgctggggaatgactaaaaagtttttctatggtaagaatggggaattgcaaacggtatatttcggcgcgcgttcaagtgagagacaaattcgtttgtataataaaaaaattgaacaagaacaaaggcatggacgaattgtaaatgttgattcactttggcgattagaaatgcagttgcgtggttcaaaaattgaaaattatgttcaggaagttagagaaatgctggaaaacttttatttgccagattgggaccatgaggaaaatttaaataggcaaatgatgatttatgcgttggttcataatcctgaattctatagtaaagcttctcgggcttctaagcagagatatagaaaaatgatttatgaagctaaaaagtcaaatagggtttctaaaattttagcgaaagaatttgtaaatcagtttgatattcttgaaggaactttgcaaaaaatgatgcagaggtatcatgctagaaatgttgaagttaaagagatagagcgtgataaggaacctgtagaatattctcaagagttaatttttcgagttaaaaaatatcgggaaattggcaaaagcacaagagaaattgcgtcgactttaggaattttggttgaaaatgttgaagaaattttagagttaaaaaatagaaattttgataactagactcaaaaatagagcaaaaaatgttacgtcttggacgtaatgagctacgtaagaatacgtcctgttcggatattacaaaaatatcaagacgtaatgtcaggtaaaagacgaacaatttagaagtatatagacgtcaaattaatcagaagtgatatcacttctaaaaatgcgaaatcgcttggtacaaccaagcccagcacaccttgataaaaggcgtggggtcagatttcccttatgctctttactagagataactaaaagaagcagattttagtcaaatttcagagtagaaactagaaggaaaactagaaactagaaatcagaggaaagaaaaattatggtaaaagttttaatccgtggaatcagcgaacaaaacttggctagaattgatcggattgttaatcaattaaatcaaaattcaagtaagaaaatttccagaaatcaatttttgagagaacaaattgaacaaattccaattaattttcaaaatcaaaatgaagattcgcaaactagtttattgattcagaagcagaataaacttctgcaggaaaatttattagggctgaatgttcttgcaaagtatttcattagtggagatgttaatgacaccgaacgagcattaaatttgttagatagtttgtcagaagacacggcaaaagaagatgattaaatttagaaagagggcaagaaatgggacgacagcactttttgcaatttcgactcaacgataagcaatggaaagaaattaggcagattagaaaagaacattgctttgataataatggtcaactttataagttcttattcttcaatgccatgttaggtgttcaaaaagaaaaagaactggaagagttacaaaaaattaatcaaaagattgataatgctttgaaaaaaagacaagaaacttacgctgattaagaggactagaaaaaatgattaagacaacttttagagcgacaatttctgatacagatttagattggattcaagattataaagaggaacacgatttaaaaaataatgctgaagtaattcatcatcttatgaagttagcagaagaaaatgaaaaaaattctaagtggacaaaagatttaagtgatattagaaaacaacagcgatttaccaaagaacaagttgcaattctaacagaaatggtaagtcccggatttaaaattgaagtgcaacgctaagtgttaaacaaaaaggccatgaagacctaaacttgaagtgacgaaaaatcaaggaaggtgaatcttcatgaccaattcaaattctagcatctctagacattatcatcaattaaatagtgtacaacgaggacaaatacaagctctgcttgatttaggcataacctcctgttccgctattgctcgagaagttggctgtcacaaatcgacaattagccgtgaaatcagacgtggcagcgtcctgcaaagagatcataactatctgctctatgagcattactatgccgatactgcgcagatctatcatgataagcgacgcaagaactgctataagcgtgatcagttaaagcattatgctgtttttctgaaaatgctgtctaagcggtttaaaactaaatttgatgctaccagcattgatgagtttgtgggtgagttcaagcagacgatgccaggctatccttgccccagcacgcctaccgtttatcgctatattgatcgcggtttgctagatataagcaatattgatctgccaatgaagcttaaaagacgcagaaacaaacggcatcatagtcatggtgggcatgctttgcataaaaagaatcttggcaattcaattgagcagcgtcctaaagaagttgaagacagagcaactcctcttcactgggaaggagattgggttaaaggcgttagacgtaaaaatcagcctgctttgatgactctgacagaaagaactactcgttttgaaattgtcatcaaaataccagattatcgagcaagtacttgtcaaagactgcttcaaaaagaaatagaccagcatccagattggttcaagactattacttttgataatggttctgagtttgcagatatgactaaaattaaaaactgtcagatctacttcgctcatccatattcaccttgggaaagaggcacaaatgaaaactgcaacggtcttctgcgtcaattcttccctaaaggcaaaagcatgaacgataagacagctgcatatgttcaacaggcaactaatgccattaaccacaaacatcgccgaatcctccaatatcacacagcagaagaactcttcaagcaataatatctcttcataacctaactgttgcacttaaattgacaattcaggaactaatttaagttctaatttatccgtttttttagttgcttgtacatctggttcaattcattagcagctatgaaaaacatatgcaaacaactacattgtatttatttgtagtcattatggcttaacatgcctatgcttttcttatcaacgtcttcatcagttttccgatattccaacttgggagtaatcgcattgaccgactcttttgacttctttttcggacgtagcttcgcccgcattctttttataaggctttatttaattctggatgttttaccagaattattaagttgagcatggcgttttcgtcacggtcaacttttttattatagttacggcagttcggattataacaaacaaattcattatgcttggtgccatgcttcttattgcctcttaaagtgattttttcatcgccttttttcactaatccgcaggctgcgcacctttgagttgaagggtacagtttattggctacgatcaatttcttgccataccattcgcatttataagtcaatatctgtctaaatctgccaaacattgacctgtgcattcctttggaggcaacatgactcataagcattcctttaacgcttaggtcttcaatcacaatagaatcatattcgctaaccagctttgtggtaaatttctgcatcaaatcattttgaatatttttagcacgagcgtaagctgcttgaagcttgtttctcgctttcatgtagcgcttgctttgcattcctttgattttaccattgacgacacgctttttagacagctgtctttgataatgcttgattttgcaatagactgctgctaacgatttgggcattactatgcattgaccgtctctgtaattgaaatgtccaacattgatatccacgcctgtatatctgcctgtcttaggcttgtcttctggatcagatattttaaaaggaatggatgcatagtatctgtttttttctttgtaaaagctgattgttccgaaatcatccgacaatggagcagagcttaatttaaagccgttccatgtttctttgacagccctaggcttttctaaaaataagcagccatccttaattttggcctgatccattttaaatccctgcctaggtgcttttttagacttgaattttggctttccccagcctggctgcgctttatcaaaaaaattctgccaagcattgcctaagtcttggatcgccaaattaaagacatgagctggaagctttgtctgccagtattgcttgttttcagtcagctcatcacgaattctgcgccaggaagggacaggattgtttgcgagaatttctctttcagcgtttgtaggcttttgtttttttctaggctttttaagttctgctttaagatgctgggttaaagccaattgtctggcttcatgcatattttgccaggtttctaaaccgagattccagctgaagcgtctgtaatcacaaagcgaatcaagaaccttcttcatcctttgattgggttttaatcgatatgttctggttttgatgatcactcttttcaccttccttctttaaatcccgcctaatcttcctgccgtaccgtctcaacccataaagccgacatgaaaacacatgaattactgaaattaagtcttcaaccatttcctcatctggagaggtttcagggttgtttaaaacaataattttagtatcgtgcttagcacaaaaatgttcaaaccaatcaaagccaaagcgggcaaaacgatctttataggtaacaaagattcgttctatttttcctgcttctacttcatccaataatttattccattttttgcggttataattaagccctgatccaatatcttctacatgttcatcaataatgatgcctctagcattggcatattcaatgatgaaagccatctgatgcctaagattttctttctgacctacagaagaaacacgggcataagcaactgtcttgcggtgaggcttaatgcccctaaaagcatccagccgctcttgcgtatagtatctgcgattggcaacattgcgctgagcaactagtcttttttctcgatcccatctttgcatggtagagcgagatacaccgagaagcttagcagcttcgccaactttataaattcttgacataaaaatagacctgctttctttgcaggtcaattatatcattaataggcatatttagatatattaaatacataatttactacttgtgattaacacttaattttttgtttgctcgaatttgtaatccttggataccattatcatatgtccactttttaacttcagtcatgtcattagtccgataataattggcaattagttcgttccattgatcccacttatctaatgggatattaattaaaccagcgccaccgtcaatcataattttattggcacttaaagttgccgtccttttgtttccgtcccaaaagatttgttgacgcatattatgatacatgacagtcaatgctttatcagtaatcgtcgttcgtggatcagtcaagattttttgtaaaaaggattgttcctgtttttcgttaattaaaggcggctcaaaaaagtcttcactacctaaattaactccccctttcccttgccgtaattctcctggtactaaggcgtcttctgctgccacaattttgttgatttgtttttccatggttaacgttaaaggggaattttgagtagtgatatattgccacccacgctttaaattaacaatcgtcaaaacatcttcaacaggtactcctgctacgctcataccgtccataatagtttgtgtttgtggcaatgtggtattaacgccttcaaagcgagcattagtatgcactaacttggtaaaatttgctcgggcaaaccgttggttttccgcagttgtgaatctatacttgtccatatatgttcgtgtcttagccatattttgtgcctcctttttatttcaatcattgattatttgaactgtctatgttaaatcaaaaagtgcttttcattgattatttgttcttggcgtttatctaagaggtaagtgtataacgcgtcaaacagcttgcatttatcaggatctcgattttgggctgcttgctcccaaatgtcttgaatatcgactgcccatgggtcagccaacaattgctcaatttttttcaacttctttgcttggtttggtcatttaaaaagcgcctatcccatttttctagtttagctatcgccaattcgcccactcaaggtatctgtttttacttctaagcgattttaaagtggctttagtaaaatatatgcgtaacacttgaagtggcttaaatgggcttatatggcgttttagttccaagcgcgctcgccatcaagattctgttcttcggggtgtttggccgcatattctctagctgcttgtcggttccaccaaacaccaaataggttttgcatggtgccgtacaggtagttctcaacattcttgatatgcttctcgtcgcttcttagagcattaaaatagcgtcttaatgttttggtcatcattttttttaaatcaggatcgtctaatagaatccatacgcctaaatccttatgctctttttcaacagcatatttggcgtttaagataatgccaataaagcgccgcatttgttgtggggtacggcaccaaaagctaagtagttgaactgcttctggttctaagaagaccggcaacccattatcttcgtcagttaagaactcatcagcatgttttactagatctcgattttgggcttcaatttcagctggtgaaaaattagttgtggaaaagtccaacttttgagtatctatatcgtatctattagtatctatattatttttatagtctttatatagattgctttcgattttcgaaattccgctcgtagcaagggtttgagggttgtcgtcaacgaagtcatgcggactttcgattttcgaaattccgctcgtagcaagggattcaacgaagtcatgcggactttcgattttcgaaattccgctcgtagtaagggattccggctttttttgcccatattcgccccttaaatagacatcagtagctttcacatcgagtttagaaaggtatagacgatttggttcattctttttagttttaggattaaatcccatttgaatttgttttaatagattggctgtttgcaattcttttttgattttaacggctttttcagtagcgcagttaaataaatcttgtaattctttaacggtaaaaataaagtagacgtgcccttgctcatcaacccagttgttgcgtaaagaatactcgagccggtctttcagtaccatataagccaatttagcatcactgcttaaatgtttatattgctcgccatacattaataccttaggaaactggaaaaataaggctccatatacgttatcggcttcatagtaattgaaatttgttgattttgtcataataaaaactccctttcttgactgacacacgctgtctcaaaagagagttgctaaaacatctgacttgctttaaaatacaaatctgatatgctttaatagaattacaaagcggatattggtcgtgatcggctttgtagtttcaccagcatgtgtctattctgggttgcccagtcggcaacttttttaatttttaagaactaaaaatggactaagtagttattagaagctacttagtccattggtcttgtcttcgttttaattagtttacctttgcttgccctttaaggtttgcttgcggtataattagcacgtaaacaagattacaatttgttcaagcaattttaactcggcggtgaaaattgcttggactaggtagctgcaagatagctacttgtcaatactgcaaaaatcccaatccagagtgtattgggattttttgtttatgaacaaagcatatcattctgcaaaggttaagtaaatatttttatggatatgatttatgattaatcataaatcatataaaatttgcgattaatcataaatcatggtaaaatgtttatgtaaaggtaggtgctactatgaatgggaaaacactattaaacttcaactttaaaggtggcgttggtaagaccaccttgactgtaatggaaacctatttattgggtcaagaggggaaaaaagtactactgatagatttcgatccccagggaaatgcaactgaaattatgaaggagacttataaagccgatttaaagccggaactttcattatatgagggccttcttggagggaatttgtctaaatctattgtgtctgttacaaaccaaattgatatgattcctacagattggacattgtctttatggattggtgctgtagaaaaagttagtcgggttaaacgtaatattctattaccacaaatgctttcaaaattaaaacaaaattacgattatatttttattgacgtaccaccaacaataaatgtctttactaataacgcaatcatggcttcagatttcatctcaattgtcttacaaactcaaaagcagtcatatacaagttctttaaaaacagctacgcatttaggtgaactacgtgaacaatacaatggaagttttcagttagttggtgtcatattgtacttaatgaagccacgtgcaaaagttgatactgaaatttctgcacaagcaaaagacttttttggcgaaggggtcttttcaaactcaattagaactcaagaacgggttaaaacgtttgctaatgaaggaatacggaataaagaccattgggataaaagagcaatccaaatgtaccaaatggttcttaatgaacaactacttagaattcaacagttagaggagtaatttatcatggcagaagattttttaaacaaagttagtaaaaaggcatctgaacaacttaaaaatctaaaaagtccataccaattcgaaacagaaagaactaaaactgttcaacttcgcatgagcacatataaagaagttaaacgcatcgcttttgagaatgacaaaaaaattgttgatgtcttagaaaaaattattcgtgaaggccttgccaaacgtaaataagattgaacttaacttatgtattactgattgtgtgatttatgataaaagattaatcttttatcataaatcacacaatcagtaaacttcactgtacaaggtatatttaaaatacgcgtggtgctagttaaatctttctagacaataagccaaattataagctaaaattgcaatttccaaccggctttgaaagcctatcagactacgtgctcgattgttctcggcattgtaataggtcagaagcgaaaagtcgctttcaattgttctgcgaatagccatcaattgatgatcattgtgctttttagctcctgtcatatttttacgatatggtgtccaaagttcataacccatttgttttagctgttgatgcagttctttgcctaaatagccttcgtcaccaagaagatagtaattagatggatgggtattttccagcagttcaactgtctccctggcatcatgaactgatgcttttgttacgacataatcaagaatgtaaccgtcatcgctaacaatgacatgaactttgaaaccatagaagtaaattttcttggtggccttataaccaatgttggcataaccgcgaaaaattttagcacgatagttgcgaattggttggcaaacaggtaccggaaagctgtcaatgatcaagaaatgtccattcaggtcaacctttttattcatttcttgccgtatctgataaatcaattgcaatagctgacgtgaacgtcgattaaaacgtgagtgtgataaacaattgaaacattcacagaatcttctttgtgattcaattcctgtcttagcttgccagataagtaaagccaaaatcagactgtccgtagttttaatttgatcaatatttcgccgatgagtaaactcagccggtgcatacaaacgataccagtgccgacaaattatcactaaatctttaaaactaacttgtaaatggtggctaaaacgcttaagcttaaggcagttcaatcagatcagactcttttctattattactatttacaagtcgagtctaacaagattggacttttttattaactaaaacgatttaactagcaccacgcgtatttaattaacttttctatccagctaaattccaaggaattcctttaatatccttgactattcgtagaaaaccaaaataagcactgatgttaaattcatcagtacttacaattgtagagtccctttgttcaacccgtattgataacgactgcttacaataataaaattaagaccactagaataacagcttatggttttcgcaactttgatcattcccgtatccgaagtctactagctctcaaatctcatggtaaaaactaagctaaaagaaaaggtcagctcaagcagcttcgctacttaaactaacctcatcaaaatacctcatcagtactgacaaaggggtaaaattgtagagctaatttgattacttgcgcttcttgtttacagcagcaaggccaaacattcccaataaggtggaggcacctaagcccattaatgttaagctattgtcattaccagtttgtggtagttggttatccttagctgtcgttggttgagacgtaatcgtcttccaagtttgcatgttaggaacattaccttctagtttgccagtaacatcatttccattaggagtagtgtttgtgggcgtattagtagctggtgttccttgcccttgatgatcattagttgggatcaaggccactttaatgatttgatcagggttaccatccttgaaggtgtaagatgttggaacactttcaccaggaactaattgataaccatcaggaatgtgaatattaactggaactgtctgaccggtcttgccaggtactgtttgaacgccaacaacctttccttgtggatcaacaaccttatacttaaccgtttggtcatgggcttcctttgtcccgtcaggcttgataacagtaatcttccgcgtgatggtcttattcaaatcagtcgtgttaacaccctttggatagttcttgccaggattgtccggaagcttatcgcttgttgtctctggcgttttgggatcagttggatctgtgtccttagtgtaaacaaaagttgtggtgtattggtatacagtatactggccactcgttactccaagagtacgaacaagacgataacctttaattttcttaggttggacttgccatgaaccatttgcataccagcctttttgcggattaaccccattatttttttggttgggattatctaggttgaacgcaagcgtatcattattcctaagcatatttccttgctcatcaatataacgcacagttactggtttgtttggtagcaagtaaacatgtatccccttagcgtaccaattgaaataatcagaattaagatatgtccctgtacttcctatataggagtaaccttgtttttcgtaatggctaatctcctcactcatttttttctcataattaccattgtttaggtcaatccttttgccatagctaccagcaatcgtaaagaatttgtacggtagatttgtttcttctggaacaagtaacaattcagtcctattactatcagaattattttttataaccttcttatacttgaaagttaaataaacatagttaggatcagctaacgaatttcgagtttgaccagtgattttaccctttaaaacaggttcagaaactaatttatatccaggaatattaatggctgcggcttcatagcgtgatgcatccggtgctttcttatcaccagcacggtgttgtggagattcaggggccatccagaaactatctagaacgattgatgctaaaatatgcccgttatctacatcaacatactctactttgattggtgacaatgatgcgtaatctaaattaatgttaatgtcttgcgtagtaatacctttcttaaggcaggcattaccttgtttatcaaaatagaaatacttattcaaaacttctgaattcattaatttataaccggccacagtaaattcttgatccacactatcccctggtcgaattgtggtctgcttgaaaggttgtttgaatacataatgaccattactaatcacttgaattggcttatgtatggtgacatcgcgaaaattcatagtaatgttgtacttactgggcagtggttgttttgctgttgttttatggattatcggcatttgttgcgctggcgttgttgttttatttggaactaatgttgatgaagtttgatgaccaaccgtatttgattcgtcgctaatccgaatattgcttgaatgggcactaacttgtggatcagtcacttgaatgtcactcgccacattatcactggtagtagcattctcatctttttcagtcgatgtattagtattatcagttgtatcagccttaactgtttgagtattattcaagccaaaaattgtaaacccaattaatactgaagcagcaccaaccgtgaattttctaattgagaaccgttctcttcttggctccatcttgcgtaagcgttctttataattattttttgaaagcattatagcaatctcctttttaacctaattatttattgtgtcaaatccaagtagagaaacactacccctacatttcacttttatatcataacacgcgtggtgctagttaaatcgttttagttaataaaaaagtccaatcttgttagactcgacttgtaaatagtaataatagaaaagagtctgatctgattgaactgccttaagcttaagcgttttagccaccatttacaagttagttttaaagatttagtgataatttgtcggcactggtatcgtttgtatgcaccggctgagtttactcatcggcgaaatattgatcaaattaaaactacggacagtctgattttggctttacttatctggcaagctaagacaggaattgaatcacaaagaagattctgtgaatgtttcaattgtttatcacactcacgttttaatcgacgttcacgtcagctattgcaattgatttatcagatacggcaagaaatgaataaaaaggttgacctgaatggacatttcttgatcattgacagctttccggtacctgtttgccaaccaattcgcaactatcgtgctaaaatttttcgcggttatgccaacattggttataaggccaccaagaaaatttacttctatggtttcaaagttcatgtcattgttagcgatgacggttacattcttgattatgtcgtaacaaaagcatcagttcatgatgccagggagacagttgaactgctggaaaatacccatccatctaattactatcttcttggtgacgaaggctatttaggcaaagaactgcatcaacagctaaaacaaatgggttatgaactttggacaccatatcgtaaaaatatgacaggagctaaaaagcacaatgatcatcaattgatggctattcgcagaacaattgaaagcgacttttcgcttctgacctattacaatgccgagaacaatcgagcacgtagtctgataggctttcaaagccggttggaaattgcaattttagcttataatttggcttattgtctagaaagatttaactagcaccacgcgtatttaaaataaatttgatttaaacatacgtggtagatcgcaaatttaggggtctagaatttttggtgttggaaagtatttctattccaaaagtactaggccctttttgataacaaaaaaaggcatctaagcctccctagtgctatgctttaagcgacgaaactcaaggtaagcgggggtaggaatagatgtctcaactagataatacacttaaattactgggagttacagacacaaacattcgggtgttcggtactcgtgaggaatttcatggtcggggctcgggtcgcaaaaagtatttggtcatccaggcagagcttacctacacactcaggcgctgtcccagctgtggatacaatacgttgcaccctaacggacacaagctcactcatgtccacattgcaggatccatggaccggcccgtaattctagagctaaacaagcaacgctggcgttgtagtaattgccatagcacttgtacggccaccactccagtagtatcaaccaaccacgccatcggtcacggactagcgactcatgtgctgaagctagccagtaaatcactcccggctaagactatcgccagtctcaccggtatttcgacaaactcagttcagcgtattttgacgttattagctaatgcgttattttccaaagccaaccatgcctttcattatttgtttctttagttaatagagttactgcgaaacatctgctataatcttaaattatgaaatacgaaacagctaaaaatttaaacaataccagattcaagcgtctgatcggcgttgctaagcctggctttgacgaaatggtcaaagtattaaaagccgaatatcaagtcaagcatgcccgaggcggcagaaagctcaagctggcaattgaagacctgcttctggctactttgcagtacctcaaggaataccgtacttatgaacaaatagctgccgattacggtgtgcatgacagcaacctgatcagaagaagccactgggccgaagagactttggctaagcatggctttaacattggcaagcaagaaatcaagccagacgatgttgtcttaatcgatgccactgaagtaaagattcaacgccccaaaaaagacaagcagcttattattccggcaagaaaaaacagcacgttttaaaagcccaggcggaatttccccatgtggattaccgaaatcatcaaacctgcaatttgaataatctaatacctcaaaaccagctcccgaagatctaataaaagaaaaagtcagccatttacgaactaattttttaaaaagctctgtcgaaaaatctccaacaattgttaatcgatctatgctaatttttacattttgtctcagatctgagtactctgactggctgttagaaagagccagcccttttttctcatttttattctctactcctacttttacattttcattctctacttttgatcttctatttctaacattaaatggtaattattgaaaataataatacttaagcagtttctttttagaaactgctttttgttttgtaatcaaaagttgaaagtcttgaatacaaaagtagaatcttctaagattagggcataagccatattcataacttgtattcataattgaaaggaaatatatgacaaataccatttatggctatgctcgtgtttcaactactcagcaggactatgcaactcaagttgaagacctaaaacaggcaggagcgaccaaaatctttaaggataaatacacaggcaccacagcaaatcgaccagaattcgataaattgatggctcaaattggtagtggtgataccctaattgtcaccaaattagatcgactagcacgtaatactcaggacgcattgaacattgttaaacaattaaatgctgagggaatcattctacgcgtcttaaatattggtacgattgataattcaccaagtggccgtctaatcttcactgtattcagtgcatttgcagaatttgaacgtgatcttatcgtgaaccgaacccaggaaggcaaggcatgggcaaaagccaataatcctaacttccatgatggtatgcctcgaaagtacacctcagaacaaattgattttgcgtggaagctccatactcaagaccacatgagctattctgaaatcagtcggaaattaggtatgtcaaaagcaactatctaccggcgttttagagagttaagagacaaaaaagccgccccgaaggacgactttttgcactagtgctttaatagctggtttagttcgtgaaggactaaatgtaattcattcaaaagtgcgattgttaggattagtgttacaacatctgacatgatacagctcctttctagccttttacagcagtgtaggggcacaaaagcatgccataaccattttatcatgttataatgattaaaggattagtgttatgctgtcgacatgaacgaggcatgcaaaacgtgggcggtcgtttgaccgctttttttatttagcatatttctaaaatttgaccaaaaaaataaaaaagcgttgatctgtcgcactttttcatcttgggaaaacaaggcatgagcgaaagctaataataccaacctccatgatggtatgcttcgaaagtacactccagaacaaattgattttgcctggaggttgcatacaggagctattctgaaatcagcaagaaattagggatctccaaaacaccaatttatcgacgctttagagaattaaagaatgcaaaataaaaaagtcaccgactatacaactgccgatgactctggtcgcgtctactaatgatgactacttatcaagtagattatttagttcccgaagaactaaatggagctcatgtagcagaacgcaaattaggaaaattgtcatgtcgtccaacgtctctcacctcctatagggtggttgattgagccaaccctagaatgtgcatgaatgacatgcatttttattttagcatgttataatacatgtaggaaaattgtcgcgtccaatgatcatggatgcatgcgcagcaagacgataacttgcgaacgcgcggtggctctgcataatagcagggcttttttgttttgaaaatcattattcaaagctaatttctgacttaatgctattttgtctactcctttttttaattatttattggtcatctccatcacgatcatcggaatattcaaaatttgtttccgcattatcaccttgctgatcctgatcctgatcctgatcgttatcggtattaattctatttgaaatttcagcgctatcagcagaagaactcttcaagcagtatatctcttcatagcctaactgttgcacttaatttgacaattcagggagatttttttgtcaaaaaagcaaaaaacaacacctacattatttttggaagataaaataaatttgaaaataattttgtattatcaaaacggcttagccacaatatattgattataaatagccgaaaatccacatgttgtattattgagcagaagatgctatattatgttcacacaaatattagataaaacaataaataatgataggagcaaatacaaatatgagttattatgatcattcacagtcaccagttgaatttgcttacaataacaacggcaaaaatatgcgagctattaactggaatgacattaaagatgataaggatcttgaggtttggaacagagttactcaaaacttttggttacctgaaaaaatcccagtttcgaatgatataagttcttggaatcaattatctgatgactggcaacagcttataactcgcactttcactggattgactttattagatacaactcaatcaagtgtgggtgatgtagcccaaattaaaaattcacaaactgatatagagcaagctatctatgcaaattttgcttttatggttgctgtccatgcaagatcatatggaactattttttctactttatgtactagtgaacaaattgaagaagcgcatgaatgggtagttaataatgatgctttacaagcaagagctaaagcggtaattccgtattatacaggcaatgatccgcttaaatcaaaggttgccgcagcaattatgccagggttcctgctttatggtggtttttatttaccattttatttagctgcaagaggtaaattgcctaatactgctgatattattagattgatcttaagagataaggttattcacaattattatagtggttacaaatatcaattggccgtaaagaaattagctccagctaaacaagcagaaatgaaaaaattcgtttttgatttcttagataaactaattgatttggaaaagaaatatttgcacgagctttatgatgattttgatttggttgatgatgcaattcatttcagtttgtataatgcaggtaaatttttacaaaatttaggctatgatactccttttaccgcagaagaaacttatatttccccagaagtattcgctcaattatcagctcaagctgatgaaaaccatgatttcttttctggtaatggttcttcatatgtaatgggaacaggagaggagactaaagatgatgactgggatttctaaaaagccattagttgtctattattcttccacttcaaataatacagcacgctttgtagaaaagttagattgtaattctattaggattcctattaaactcagtaaagaaatttcagtttctgaagaatatattttaattacgccaacttattctggtggccatgggactacaggtgctgtgcctgagcaagttatccactttttgaacaaattggctaatcggcaaaaatgtattggtgttattgctagtggaaataccaattttggtaattcttttgccttggcaggggatgtaatttctaagaaattacatgttccttatctatataaatttgagttactgggaacaactgaagatgtaaataatgttaataaaataattgctgatgcaggtgaggacaatgactgatcatcttaataatgattcatatatttctttaaatgcacttgctaaatttaaagatgaaaaaggaaattataattttaaagctgacaaggaagctactaagcaatatcttgaaaatcatattgaaccaagaatgaaaaagtttgcttctttagaagaaaaattagcttatttagttgataataattactatgataaaaaagttctagatttatatacagctaaatttattaaagaaattttcaaattagcttatgcgcaaaattttagctttttgaactttatgggtgcagctaaattctataaagcatatgccttaaaaacaaacgataataaacaatttttagaacgttttgaagatcgggctgttatgaatgctttatttttagctgatggcaatgaagaactggccttgaatttagttaaagatattattagtaatcgtttccagccagcaactccgactttcttgaatgcaggtaaaaagagacgcggtgaatatgtttcatgttatttgctcagagttgaagacaatatggaatcaatttcacgagcaataagcacaagtctgcaattatctaaacgtggtggtggtgttgctctatgcttaactaatttgcgtgaattaggtgcacctattaaaaaaatgaagaatttatctagtgggataattcctgtaatgaaattactagaagattcattttcttatgccaatcaattagggcaaagacaaggtgccggtgcagtttatttaagtgcccatcatccccagattctgcaatttttagatactaaacgagaaaacgctgacgaaaaggtaagaattaaatctttatcacttggcgtagtgattccagatattacttttgaactagccaaagaaaataaaaagatggctttgttttcaccatatgatattaaacgtgaatatggtaaaccaatgtcagatatttcaattactaaagaataccaaaatctccttaataatccatgtattaaaaagacatttatcagtgctagaaaattcttccaaactattgctgaagttcaatttgaatcagggtatccctatattatgtatgaagatactgtcaatcgaagaaacccacaaaagaaattggggcggatcgtgatgtctaatttatgttcagaaattgctcaggttaatacgccaagtacctataatgaagacttaagttttaataagacgggctacgatgtttgttgtaatttaggatcacttaatattgcagcagcaatgaatagcgctgacaagttaggtggtttggtttctgatagtgttcaagcgcttaatcgtgttgccaggtcttcagatttagattgtgctccttcaattgaaaagggaaataaagctaatcgagcaatcggtctaggagcaatgaatttacatggctttttagcaactaatcatatttattatgattcaccagaagcagttgaatttacaggaattttcttttatacaattgcataccatgcatttaaagaatcaaataaattagctgaaaagtatggtgcttttaaaggattcaaagattcatcatatgctagtggtgattatttcaaaaaatttattgatgaggaagtctcaccgaaaacagacaagattaaagaaattgtagctaaatataaattagttattccaactaaagaagattgggaagaattgattactaaaattaaaaagacaggtatagctaatgctaacttgttagcagttgcacctactggatcaattagttatttatcttcatgtacaccaagtttgcagccagtagtagctcctgttgaaacacgcaaagaggctgatttgggtcgaatttatgtaccagcttataagattaataaagacaattatgagtattacgaaaagggtgcatatgaagtaggacctaatgctattattgatattacagctgctgcacaaaagtatgttgatcaatcaatttcgttaactttatttgttgaagataatgcaacaacaagagatttaaataaggcttatatttatgcctttaaaaagcgctgcaactcaatttattatgttagaataagagaaaaagttttagctggtagtgagaacttgactgcagacgaatgtttaattcaaaatggtgcagaatgccagaaatgtatgatttagtttaataatagaaaagcagctaaagtgtttattgatatgaaccccgaaattcggacaagaatttcggggtttttatttatgtctaaattatccaaacaagataaaattgatatttacaataattggaaaaattataatatatcagctaatcacgcagcagccgcatgtcatgccggtatgcctggcagctgtctaaatgaataattctgccggtaatgtctgtaatcgcctgggcaagttgcatattttgaagttcctaggtttcaaaaagataagattagaattgactttaatcccaatcattcg
